(19) United States
(12) Patent Application Publication
(10) Pub. No.: US 2011/0306125 A1
(43) Pub. Date: Dec. 15, 2011

(54) Protein Expression Methods

(75) Inventor: Marco Kessler, Danvers, MA (US)

(73) Assignee: Ironwood Pharmaceuticals, Inc., Cambridge, MA (US)

(21) Appl. No.: 13/001,888

(22) PCT Filed: Jun. 30, 2009
(86) PCT No.: PCT/US09/03879

§ 371 Date: Feb. 28, 2011

Related U.S. Application Data
(60) Provisional application No. 61/077,049, filed on Jun. 30, 2008.

(51) Int. Cl. C12N 5/10; C12N 15/63; C07K 14/00; C07K 1/14; C12N 1/21; C12N 1/19; C07K 1/107; C12N 15/11; C07K 7/08

(52) U.S. Cl. 435/348; 536/23.1; 435/320.1; 530/324; 530/326; 435/252.33; 435/254.2; 435/325; 435/358; 435/365; 530/345

(57) ABSTRACT

The present invention relates to compositions and methods for obtaining (e.g., expressing, isolating and/or purifying) polypeptides capable of binding to and/or activating the guanylate cyclase C receptor.

### PRIORITY CLAIM

[0001] This application claims priority to U.S. Application Ser. No. 61/077,049, filed Jun. 30, 2008. The entire contents of the aforementioned application is incorporated herein by reference.

### TECHNICAL FIELD

[0002] This disclosure relates to compositions and methods for obtaining (e.g., expressing, isolating and/or purifying) polypeptides capable of binding to and/or activating the guanylate cyclase C receptor.

### SEQUENCE LISTING

[0003] This application incorporates by reference in its entirety the Sequence Listing entitled IW060 seq_ST25.txt (5 megabytes) which was created Jun. 30, 2009 and filed with herewith in this International PCT application on Jun. 15, 2009.

### BACKGROUND

[0004] The guanylate cyclase (GC-C) receptor is a key regulator of fluid and electrolyte balance in the intestine. When stimulated, this receptor, which is located on the apical membrane of the intestinal epithelial surface, causes an increase in intestinal epithelial cyclic GMP (cGMP). This increase in cGMP is believed to cause a decrease in water and sodium absorption and an increase in chloride and potassium ion secretion, leading to changes in intestinal fluid and electrolyte transport and increased intestinal motility. The intestinal GC-C receptor possesses an extracellular ligand binding region, a transmembrane region, an intracellular protein kinase-like region and a cyclase catalytic domain. Proposed functions for the GC-C receptor are fluid and electrolyte homeostasis, the regulation of epithelial cell proliferation and the induction of apoptosis (Shalubhai 2002 Curr Opin Drug Dis Devel 5:261-268).

[0005] In addition to being expressed in the intestine by gastrointestinal epithelial cells, the GC-C receptor is expressed in extra-intestinal tissues including kidney, lung, pancreas, pituitary, adrenal, developing liver and gall bladder (reviewed in Vaandrager 2002 Mol Cell Biochem 230:73-83, Kulaksiz et al. 2004, Gastroenterology 126:732-740) and male and female reproductive tissues (reviewed in Vaandrager 2002 Mol Cell Biochem 230:73-83).

[0006] A number of naturally occurring polypeptides are capable of binding to and/or activating the GC-C receptor. In humans, such polypeptides include, for example, guanylin (Gn), uroguanylin (Ugn), lymphoguanylin, renoguanylin (each of which are considered to be members of the natriuretic family of peptides (see e.g., Currie et al., Proc. Natl. Acad. Sci. USA., 89:947-951, 1992; Hamra et al., Proc. Natl. Acad. Sci. USA., 90:10464-10468, 1993; Yuge et al., J. Biol. Chem., 278:22726-22733, 2003; Forte et al., Endocrinology, 140:1800-1806, 1999)), and the class of bacterially derived peptides, termed ST (reviewed in Gianella 1995 J Lab Clin Med 125:173-181). Such polypeptides are typically referred to as GC-C agonists.

[0007] Effective systems are required for obtaining (e.g., expressing and purifying) GC-C agonists capable of binding to and/or activating GC-C.

### SUMMARY

[0008] The present disclosure provides compositions and methods for producing biologically active GC-C receptor binding and/or activating peptides.

[0009] Described herein is a nucleic acid molecule comprising (consisting essentially of or consisting of) a nucleotide sequence encoding a polypeptide comprising (consisting essentially of or consisting of) the amino acid sequence:

[0010] A-B-C-D-E, wherein:

[0011] A comprises a GC-C receptor binding polypeptide presequence;

[0012] B is one or more methionine residues;

[0013] C comprises a GC-C receptor binding polypeptide prosequence;

[0014] D is one or more methionine residues; and

[0015] E comprises a GC-C receptor binding polypeptide.

[0016] Also described herein is a nucleic acid molecule comprising (consisting essentially of or consisting of) a nucleotide sequence encoding a polypeptide comprising (consisting essentially of or consisting of) the amino acid sequence:

[0017] B-C-D-E, wherein:

[0018] B is one or more methionine residues;

[0019] C comprises a GC-C receptor binding polypeptide prosequence;

[0020] D is one or more methionine residues; and

[0021] E comprises a GC-C receptor binding polypeptide.

[0022] A nucleic acid molecule comprising (consisting essentially of or consisting of) a nucleotide sequence encoding a polypeptide comprising (consisting essentially of or consisting of) the amino acid sequence:

[0023] A-C-D-E, wherein:

[0024] A comprises a GC-C receptor binding polypeptide presequence;

[0025] C comprises a GC-C receptor binding polypeptide prosequence;

[0026] D is one or more methionine residues; and

[0027] E comprises a GC-C receptor binding polypeptide.

[0028] Described herein is a nucleic acid molecule comprising (consisting essentially of or consisting of) a nucleotide sequence encoding a polypeptide comprising (consisting essentially of or consisting of) the amino acid sequence:

[0029] A-B-C-E, wherein:

[0030] A comprises a GC-C receptor binding polypeptide presequence;

[0031] B is one or more methionine residues;

[0032] C comprises a GC-C receptor binding polypeptide prosequence;

[0033] E comprises a GC-C receptor binding polypeptide.

[0034] Described herein is a nucleic acid molecule comprising (consisting essentially of or consisting of) a nucleotide sequence encoding a polypeptide comprising (consisting essentially of or consisting of) the amino acid sequence:

[0035] C-D-E, wherein:

[0036] C comprises a GC-C receptor binding polypeptide prosequence;

[0037] D is one or more methionine residues; and

[0038] E comprises a GC-C receptor binding polypeptide.

[0039] Described herein is a nucleic acid molecule comprising (consisting essentially of or consisting of) a nucleotide sequence encoding a polypeptide comprising (consisting essentially of or consisting of) the amino acid sequence:

[0040] A-B-E, wherein:

[0041] A comprises a GC-C receptor binding polypeptide presequence;

[0042] B is one or more methionine residues;

[0043] E comprises a GC-C receptor binding polypeptide.

[0044] Described herein is a nucleic acid molecule comprising (consisting essentially of or consisting of a nucleotide sequence encoding a polypeptide comprising (consisting essentially of or consisting of) the amino acid sequence:

[0045] D-E, wherein:

[0046] D is one or more methionine residues; and

[0047] E comprises a GC-C receptor binding polypeptide.

[0048] In various cases: B, when present, is one methionine; B, when present, is two or more methionines; D, when present, is one methionine; D, when present, is two or more methionines; A, when present, comprises a sequence selected from SEQ ID NO:17, SEQ ID NO:18, SEQ ID NO:19, SEQ ID NO:20, SEQ ID NO:21, SEQ ID NO:22, or a presequence depicted in FIG. 10; A is SEQ ID NO:17; A is SEQ ID NO:18; A is SEQ ID NO:20; A is SEQ ID NO:21; A is SEQ ID NO:22; A is a presequence depicted in FIG. 10; A is a presequence depicted in FIG. 9; C, when present, comprises a sequence chosen from a pro sequence depicted in FIG. 10 or FIG. 9, SEQ ID NO:11, SEQ ID NO:12, SEQ ID NO:13, or SEQ ID NO:14; C is SEQ ID NO:11; C is SEQ ID NO:12; C is SEQ ID NO:13; wherein C is SEQ ID NO:14; C is a prosequence depicted in FIG. 10; C is a prosequence depicted in FIG. 9; E comprises a sequence selected from: a processed active peptide (mature) sequence depicted in FIG. 10, SEQ ID NO:9, SEQ ID NO:10, SEQ ID NO:14A; SEQ ID NO:199; SEQ ID NO:15, or SEQ ID NO:16; E is a processed active peptide (mature) sequence depicted in FIG. 10; E is SEQ ID NO:9; E is SEQ ID NO:10; E is SEQ ID NO:14A; E is SEQ ID NO:199; E is SEQ ID NO:15; E is SEQ ID NO:16; E comprises a sequence chosen from the group consisting of SEQ ID NOs: 27-33, 34-59 and 63-62; E is SEQ ID NO: 63; E is SEQ ID NO: 64; E is SEQ ID NO: 805.

[0049] In some cases: E comprises: E1-E2-E3, wherein E1 is an N-terminal non-core sequence in FIG. 9, E2 is an active “core” sequence in FIGS. 9 and E3 is a C-terminal non-core sequence in FIG. 9; E comprises: E1-E1′-E2-E3, wherein E1 is an N-terminal non-core sequence in FIG. 9, E1′ is one or more methionine residues, E2 is an active “core” sequence in FIGS. 9 and E3 is a C-terminal non-core sequence in FIG. 9; E1′ is one methionine residue; E1′ is more than one methionine residue; E comprises E1-E2, wherein: E1 is an N-terminal non-core sequence in FIGS. 9 and E2 is an active “core” sequence in FIG. 9; E comprises E2-E3, wherein: E2 is an active “core” sequence in FIGS. 9 and E3 is a C-terminal non-core sequence in FIG. 9; E comprises E2, wherein E2 is an active “core” sequence in FIG. 9; E comprises a sequence chosen from a sequence depicted in FIG. 10.

[0050] Also described is a nucleic acid molecule comprising (consisting essentially of or consisting of) a nucleotide sequence encoding a polypeptide comprising (consisting essentially of or consisting of) the amino acid sequence: Z2-Z3, wherein: Z2 is one or more methionine residues and Z3 comprises SEQ ID NO:9, SEQ ID NO:10, SEQ ID NO:15, or SEQ ID NO:16. In certain cases, the polypeptide further comprises Z0 or Z1 or both, wherein: Z0 is SEQ ID NO:17, SEQ ID NO:18, SEQ ID NO:19, SEQ ID NO:20, SEQ ID NO:21, SEQ ID NO:22, a pre sequence depicted in FIG. 9, or is missing; and Z1 comprises SEQ ID NO:11, SEQ ID NO:12, SEQ ID NO:13, or SEQ ID NO:14, a pro sequence depicted in FIG. 9, or is missing. In various cases: the polypeptide comprises Z1 Z2 Z3; the polypeptide comprises Z0 Z2 Z3; the polypeptide comprises Z0 Z1 Z2 Z3; the polypeptide comprises Z0 Z2 Z1 Z2 Z3, wherein: Z0 is SEQ ID NO:17, SEQ ID NO:18, SEQ ID NO:19, SEQ ID NO:20, SEQ ID NO:21, SEQ ID NO:22, a pre sequence depicted in FIG. 9, or is missing and Z1 comprises SEQ ID NO:11, SEQ ID NO:12, SEQ ID NO:13, or SEQ ID NO:14, a pro sequence depicted in FIG. 9, or is missing; the polypeptide comprises Z0 Z2 Z1 Z3, wherein: Z0 is SEQ ID NO:17, SEQ ID NO:18, SEQ ID NO:19, SEQ ID NO:20, SEQ ID NO:21, SEQ ID NO:22, a pre sequence depicted in FIG. 9, or is missing and Z1 comprises SEQ ID NO:11, SEQ ID NO:12, SEQ ID NO:13, or SEQ ID NO:14, a pro sequence depicted in FIG. 9, or is missing; Z0 comprises SEQ ID NO:17; Z0 comprises SEQ ID NO:18; Z0 comprises SEQ ID NO:19; Z0 comprises SEQ ID NO:20; Z0 comprises SEQ ID NO:21; Z0 comprises SEQ ID NO:22; Z0 comprises a pre sequence depicted in FIG. 9; Z1 comprises SEQ ID NO:11; Z1 comprises SEQ ID NO:12; Z1 comprises SEQ ID NO:13; Z1 comprises SEQ ID NO:14; Z1 comprises a pro sequence depicted in FIG. 9; Z3 comprises SEQ ID NO:9; Z3 comprises SEQ ID NO:10; Z3 comprises SEQ ID NO:15; Z3 consists of SEQ ID NO:16.

[0051] Also described is a nucleic acid molecule comprising (consisting essentially of or consisting of) a nucleotide sequence encoding a polypeptide comprising (consisting essentially of or consisting of) the amino acid sequence:

[0052] A′-B′-Z2-D′, wherein:

[0053] A′ is an amino acid sequence comprising (consisting essentially of or consisting of) a pre sequence depicted in FIG. 9, or is missing;

[0054] B′ is an amino acid sequence comprising (consisting essentially of or consisting of) a pro sequence depicted in FIG. 9, or is missing;

[0055] Z2 is one or more methionine residues; and

[0056] D′ is an amino acid sequence selected from the group consisting of SEQ ID NOs:63-1629, or an active core sequence depicted in FIG. 9.

[0057] Also described is a nucleic acid molecule comprising (consisting essentially of or consisting of) a nucleotide sequence encoding a polypeptide comprising (consisting essentially of or consisting of) the amino acid sequence:

[0058] A′-Z2-D′, wherein:

[0059] A′ is an amino acid sequence comprising (consisting essentially of or consisting of) a pre sequence depicted in FIG. 9, or is missing;

[0060] Z2 is one or more methionine residues; and

[0061] D′ is an amino acid sequence selected from the group consisting of SEQ ID NOs:63-1629, or an active core sequence depicted in FIG. 9.

[0062] Also described is a nucleic acid molecule comprising (consisting essentially of or consisting of) a nucleotide sequence encoding a polypeptide comprising (consisting essentially of or consisting of) the amino acid sequence:

[0063] B′-Z2-D′, wherein:

[0064] B′ is an amino acid sequence comprising (consisting essentially of or consisting of) a pro sequence depicted in FIG. 9, or is missing;

[0065] Z2 is one or more methionine residues; and

[0066] D′ is an amino acid sequence selected from the group consisting of SEQ ID NOs:63-1629, or an active core sequence depicted in FIG. 9.

[0067] Also described is a nucleic acid molecule comprising (consisting essentially of or consisting of) a nucleotide sequence encoding a polypeptide comprising (consisting essentially of or consisting of) an amino acid sequence depicted in Table 3, wherein:

[0068] A′ is an amino acid sequence comprising (consisting essentially of or consisting of) a pre sequence depicted in FIG. 9, or is missing;

[0069] B′ is an amino acid sequence comprising (consisting essentially of or consisting of) a pro sequence depicted in FIG. 9, or is missing;

[0070] Z2 is one or more methionine residues; and

[0071] D′ is an amino acid sequence selected from the group consisting of SEQ ID NOs:63-1629, or an active core sequence depicted in FIG. 9.

[0072] In various cases: the nucleic acid molecule further comprises a nucleotide sequence encoding amino acid sequences C′, E′, or both C′ and E′, wherein C′ is located between Z2 and D′ and/or E′ is located adjacent to and following D′; C′ is an amino acid sequence comprising (consisting essentially of or consisting of) an amino-terminal non-core sequence depicted in FIG. 9; E′ is an amino acid sequence comprising (consisting essentially of or consisting of) a carboxy-terminal non-core depicted in FIG. 9; D′ is SEQ ID NO:63; D′ is SEQ ID NO:64; D′ is SEQ ID NO:805.

[0073] Also described herein are: a nucleic acid molecule comprising (consisting essentially of or consisting of) a nucleotide sequence encoding a polypeptide comprising (consisting essentially of or consisting of) SEQ ID NO:7; a nucleic acid molecule comprising (consisting essentially of or consisting of) a nucleotide sequence encoding a polypeptide comprising (consisting essentially of or consisting of) SEQ ID NO:8; a nucleic acid molecule comprising (consisting essentially of or consisting of) the nucleotide sequence of SEQ ID NO:24; a nucleic acid molecule comprising (consisting essentially of or consisting of) the nucleotide sequence of SEQ ID NO:2; an a nucleic acid molecule comprising (consisting essentially of or consisting of) the nucleotide sequence of SEQ ID NO:4. In certain cases: the polypeptide comprises an affinity tag located at the amino-terminus and/or the carboxy-terminus of the polypeptide; the polypeptide and the affinity protein are adjacent to each other; the polypeptide and the affinity protein are separated by a protease recognition site.

[0074] In some cases the nucleic acid molecule further comprises: a nucleic acid sequence encoding an affinity tag located at the 5′ or 3′ terminus of the nucleic acid molecule; and a nucleic acid sequence encoding a protease recognition site.

[0075] Also described is an expression vector comprising (consisting essentially of or consisting of) a nucleic acid molecule described herein; an expression vector comprising (consisting essentially of or consisting of) two or more nucleic acid molecules; an expression vector wherein the nucleic acid molecule is operably linked to a promoter capable of driving expression of the nucleic acid molecule in a cell; an expression vector wherein the nucleic acid molecule is operably linked to a promoter capable of driving expression of the nucleic acid molecule in a cell; an expression vector further comprising (consisting essentially of or consisting of) an internal ribosome entry site; a DNA vector; expression vector pET32b.

[0076] Also described is a polypeptide encoded by the nucleic acid molecule described herein. In certain cases: the polypeptide consists of one methionine residue; the polypeptide consists of two methionine residues; and Z2 comprises two or more methionine residues.

[0077] Also described is a recombinant cell comprising (consisting essentially of or consisting of) a nucleic acid molecule or expression construct described herein.

[0078] Also described is a method of making a polypeptide capable of binding to and/or activating the guanylate cyclase (GC-C) receptor, the method comprising (consisting essentially of or consisting of) obtaining a polypeptide described herein and cleaving the polypeptide at carboxyterminal to methionine residues. In certain cases: the step of cleaving the polypeptide comprises contacting the polypeptide with cyanogen bromide; and the polypeptide capable of binding to and/or activating the guanylate cyclase (GC-C) receptor is purified.

[0079] Unless otherwise defined, all technical and scientific terms used herein have the same meaning as commonly understood by one of ordinary skill in the art to which this disclosure belongs. Methods and materials are described herein for use in the present disclosure; other, suitable methods and materials known in the art can also be used. The materials, methods, and examples are illustrative only and not intended to be limiting. All publications, patent applications, patents, sequences, database entries, and other references mentioned herein are incorporated by reference in their entirety. In case of conflict, the present specification, including definitions, will control.

[0080] Other features and advantages of the disclosed methods and compositions will be apparent from the following detailed description and figures, and from the claims.

### DESCRIPTION OF DRAWINGS

[0081] FIG. 1 shows the nucleotide sequence of human uroguanylin, including portions coding for the pre and pro sequences (GenBank® U34279; GI:1236798) (SEQ ID NO:1).

[0082] FIG. 2 shows the nucleotide sequence of human uroguanylin, including portions coding for the pre and pro sequences modified to encode a methionine just before the sequence encoding the mature protein (SEQ ID NO:2). The added methione codon is in bold and underlined.

[0083] FIG. 3 shows the nucleotide sequence of human guanylin (GenBank® Accession M97496; GI:183414) (SEQ ID NO:3).

[0084] FIG. 4 shows the nucleotide sequence of human guanylin modified to encode a methionine just before the sequence encoding the mature protein (SEQ ID NO: 4). The added methione codon is in bold and underlined.

[0085] FIG. 5 shows the huProMUGN DNA cassette. The nucleic acid sequence is SEQ ID NO:23. The guanylin coding sequence has been adapted for codon usage in E. coli. The amino acid sequence is SEQ ID NO:24. Restriction endonuclease sites are indicated in bold or using (˜). The PreScission3 protease cleavage site is indicated by an open box. The cleavage site within this site is represented by a thin arrow. The cleavage site amino acids that will remain following PreScission3 protease cleavage are shown by a circle. The Pro UGN nucleotide and amino acid sequence is indicated by a solid underline. The mature UGN nucleotide and amino acid sequence is indicated by a dotted underline. The methionine inserted between the pro and mature UGN sequences is indicated by an arrow.

[0086] FIG. 6 is a schematic representation of the Trx-huProMUGN fusion protein. TrxA, HisTag, and S Tag are affinity tags. PreScission is a protease recognition site. HuProMUGN is modified human prouroguanylin (i.e. comprising an additional methionine residue).

[0087] FIG. 7 is a photograph of a coomassie stained gel. Molecular weight markers are shown on the left (M). Lane 1 is following cleavage with PreScission protease and Glutathione sepharose chromatography. Lane 2 is flow through (Trx-proMuroguanylin and proMuroguanylin). Lane 3 is the eluate following treatment with PreScission protease and purification using TALON metal affinity chromatography. Lane 4 is proMuroguanylin. Lane 5 is TrxA tag and uncleaved fusion protein.

[0088] FIG. 8 is a line graph showing cGMP activity. Sigma UGN is synthetic uroguanylin.

[0089] FIG. 9 is a table depicting various subsequences of ST polypeptides.

[0090] FIG. 10 is a table depicting various subsequences of guanylin and uroguanylin polypeptides

### DETAILED DESCRIPTION

[0091] The present disclosure provides compositions and methods for producing polypeptides capable of binding to and/or activating the guanylate cyclase (GC-C) receptor.

### Polypeptides

[0092] In some cases the polypeptides described herein are produced as a mature polypeptide. In some cases, the polypeptides described herein are obtained as propeptides and/or prepropeptides and/or prepeptides. These pro, pre and/or prepropeptides can be processed using the methods described herein to yield a smaller polypeptide. Such polypeptides may be referred to as “mature,” “active,” and/or “biologically active” polypeptides. The activity of a mature peptide or a biologically active peptide can be assessed using one or more of the methods described herein. The biologically active peptides bind the GC-C receptor and/or bind and activate the GC-C receptor (GC-C receptor agonists).

[0093] In some cases, the peptides described herein can be expressed as fusion proteins, e.g., with an amino (N)-terminal and/or carboxy (C)-terminal affinity tag. Suitable affinity tags and the methods required for producing a fusion protein that includes an affinity tag are known in the art and are included in those described below.

[0094] In some cases a polypeptide will be produced, e.g., recombinantly, with a pre sequence, a pro sequence, and/or non-core sequences (e.g., an N-terminal portion of the mature peptide that is not essential for activity (N-terminal non-core sequence) and/or a C-terminal portion of the mature peptide that is not essential for activity (C-terminal non-core sequence)). In certain cases the one or more of the pre sequence, pro sequence, N-terminal non-core sequence and/or C-terminal non-core sequence is removed prior to administering the polypeptide to a patient. In certain cases only pre sequence and/or pro sequence is removed prior to administration of the polypeptide to a patient. In other cases the preproprotein, proprotein or the preprotein is administered to the patient. The pre sequence and/or the pro sequence may stabilize the polypeptide or an active isomer thereof, facilitate efficient folding of the polypeptide or desired intracellular (e.g. export to the periplasm) or extracellular localization during recombinant synthesis, or protect the polypeptide from degradation in the patient's body. Thus, pre sequences, pro sequences and/or preprosequences that do not significantly interfere with GC-C receptor agonist activity can be beneficial. The pre sequence can be chosen from those including but not limited to the pre sequences described herein. In certain cases the pre sequence may comprise a positively charged amino terminal region, followed by a hydrophobic region, and a neutral but polar carboxy terminal region. Such sequences can be predicted using algorithms such as SignalP 3.0 (Emanuelsson et al. (2007) Nature Protocols 2: 953-971; and www.cbs.dtu.dk/services/SignalP/).

[0095] Guanylin and Uroguanylin and Related Peptides

[0096] GN and UGN are guanylate cyclase activating peptide hormones that are secreted from the epithelia of the intestine, kidney, pancreas, and salivary gland. Specifically, enterochromaffin cells along the intestine secrete GN and UGN into the intestinal lumen (Cetin et al., Proc. Natl. Acad. Sci. USA., 91:2935-2939, 1994; Perkins et al., Gastroenterology, 113:1007-1014, 1997). When correctly expressed, these peptides bind to and/or activate the guanylate cyclase C receptor (GC-C receptor).

[0097] Normally, GN and UGN are secreted as biologically inactive prohormones (i.e., the prohormone is nearly inactive with respect to GC-C activation), which are processed to yield the mature, biologically active, hormones. GN prohormone (proguanylin (proGN)) has 94 amino acids and is processed to yield 15 amino acid mature guanylin. UGN prohormone (prouroguanylin (proUGN)) has 86 amino acid residues and is processed in the kidney to yield a 16 amino acid peptide (e.g., found in urine) and in the ciculation to yield a 24 amino acid peptide (e.g., found in blood).

[0098] The amino-terminal prosequences of proGN and proUGN have intra-molecular chaperone-like features. Proper biological activity requires that cysteine residues within the mature hormone form disulphide bonds in a 1-3/2-4 conformation (Forte and Currie, FASEB J., 9:643-650, 1995; Klodt et al., J. Pept. Res., 50:222-230, 1997). Two topological isoforms of each peptide exists (known as A- and B-isomers), with only the A-isomer showing biological activity (Lauber and Marx, Protein and Peptide Letters, 12:153-158, 2005).

[0099] Unmodified human prouroguanylin has the sequence: VYIQYQGFRVQLESMKKLSDLEAQWAPSPRLQAQSLLPAVCHHPALPQDLQPVCAS QEASSIFKTLRTIANDDCELCVNVACTGCL (SEQ ID NO:5-human proUGN (huproUGN); mature kidney processed UGN portion (16 amino acids) is shown underlined; mature circulation processed UGN (24 amino acids) is shown in bold).

[0100] Unmodified human proguanylin has the sequence:

[0101] VTVQDGNFSFSLESVKKLKDLQEPQEPRVGKLRNFAPIPGEPVVPILCSNPNFP EELKPLCKEPNAQEILQRLEEIAEDPGTCEICAYAACTGC (SEQ ID NO:6; human proGN (huproGN); mature GN portion underlined).

[0102] Described herein are various useful polypeptides that can include all or a portion of the sequence of human prouroguanylin. These polypeptides can be peptides encoded by all or a portion of the sequence of SEQ ID NO:1 that has been modified to include one or more methionine encoding codons (ATG). For example, peptides can include those encoded by the sequence of SEQ ID NO:2.

[0103] In some cases, peptides can include all or a portion of a modified proUGN that has one or more methionine residues inserted immediately prior to the first amino acid of the 16 residue mature UGN peptide (i.e., immediately prior to the underlined portion of SEQ ID NO: 5 for the kidney form) or one or more methionine residues inserted immediately prior to the first amino acid of the 24 residue mature UGN peptide (i.e., immediately prior to the bold portion of SEQ ID NO: 5 for the mature circulation form). Thus, certain peptides can include all or a portion of the sequence: VYIQYQGFRVQLESMKKLSDLEAQWAPSPRLQAQSLLPAVCHHPALPQDLQPVCAS QEASSI [symbol] FKTLRTIA [symbol] NDDCELCVNVACTGCL (SEQ ID NO:7—modified human prouroguanylin (huproMUGN); 16 residue mature (kidney form) uroguanylin portion is underlined; 24 residue mature (circulation form) uroguanylin portion is shown in bold; one or more inserted methionines are shown in a box).

[0104] Also described herein are various peptides that include all or a portion of a modified proGN that has one or more methionine residues inserted immediately prior to the first amino acid of the mature GN peptide (i.e., just before the underlined portion of SEQ ID NO: 6). Thus, certain peptides include all or a portion of the sequence: VTVQDGNFSFSLESVKKLKDLQEPQEPRVGKLRNFAPIPGEPVVPILCSNPNFPEELKP LCKEPNAQEILQRLEEIAED [symbol] PGTCEICAYAACTGC (SEQ ID NO:8; modified human proguanylin (huproMGN); mature guanylin portion underlined; inserted methionine is shown in a box).

[0105] In some cases, peptides can include all or a portion of a peptide that is, or is related to, the mature uroguanylin portion of human prouroguanylin. For example, peptides can include all or a portion of the sequences:

NDDCELCVNVACTGCL
(SEQ ID NO: 9; unmodified mature uroguanylin);
or
(SEQ ID NO: 10)
X₇₃ D X₇₅ C E L C X₈₀ N V AC₈₄T₈₅G₈₆C₈₇L₈₈,

wherein:

[0106] X₇₃ is N, T, G or Q;

[0107] X₇₅ is D or E;

[0108] X₈₀ is V or I;

[0109] C₈₄ is present or absent;

[0110] T₈₅ is present or absent;

[0111] G₈₆ is present or absent;

[0112] C₈₇ is present or absent; and

[0113] L₈₈ is present or absent; in combination with all or a portion of the human proUGN prosequence. Thus, peptides can include a peptide having all or a portion of the sequence:

(SEQ ID NO: 11)
VYIQYQGFRVQLESMKKLSDLEAQWAPSPRLQAQSLLPAVCHHPALPQ
DLQPVCASQEASSIFKTLRTIA.

[0114] In some cases, peptides can include all or a portion of a peptide that is related to the prosequence of human prouroguanylin. Thus, peptides include a peptide comprising (or consisting of or consisting essentially of) at least 10 contiguous amino acid of a polypeptide having the sequence:

(SEQ ID NO: 12)
V X₂ I X₄ Y X₆ G X₈ X₉ V X₁₁ L X₁₃ S X₁₅ K X₁₇ L X₁₉
X₂₀ L X₂₂ X₂₃ X₂₄ X₂₅ X₂₆ X₂₇ X₂₈ X₂₉ X₃₀ X₃₁ X₃₂
X₃₃ X₃₄ X₃₅ X₃₆ X₃₇ X₃₈ X₃₉ X₄₀ X₄₁ C X₄₃ X₄₄ X₄₅
A L P X₄₉ D L X₅₂ P X₅₄ C X₅₆ X₅₇ X₅₈ X₅₉ X₆₀ X₆₁
X₆₂ X₆₃ X₆₄ X₆₅ X₆₆ LR X₆₉ X₇₀ X₇₁,

wherein:

[0115] X₂ is Y or D;

[0116] X₄ is Q or K;

[0117] X₆ is Q, H or E;

[0118] X₈ is F or Y;

[0119] X₉ is R or Q;

[0120] X₁₁ is Q or K;

[0121] X₁₃ is E, K or D;

[0122] X₁₅ is M or V;

[0123] X₁₇ is K or Q;

[0124] X₁₉ is S, N, K or D;

[0125] X₂₀ is D, E or A;

[0126] X₂₂ is E, V or L;

[0127] X₂₃ is A, E or G;

[0128] X₂₄ is Q or K;

[0129] X₂₅ is W, Q, E or P;

[0130] X₂₆ is A, M, V or R;

[0131] X₂₇ is P or S;

[0132] X₂₈ is S, N, D or F;

[0133] X₂₉ is P or R;

[0134] X₃₀ is R, Q, G or H;

[0135] X₃₁ is L, P, Q or R;

[0136] X₃₂ is Q, R or M;

[0137] X₃₃ is A, K, R, D or G;

[0138] X₃₄ is Q, S or T;

[0139] X₃₅ is S, G, D or Q;

[0140] X₃₆ is L, R or is missing;

[0141] X₃₇ is L, P or D;

[0142] X₃₈ is L, Q or P;

[0143] X₃₉ is P or S;

[0144] X₄₀ is A, S, D or V;

[0145] X₄₁ is V or L;

[0146] X₄₃ is H, Y or S;

[0147] X₄₄ is H, N or D;

[0148] X₄₅ is P or S;

[0149] X₄₉ is Q, L, P or S;

[0150] X₅₂ is Q or R;

[0151] X₅₄ is V or I;

[0152] X₅₆ is A, Q, T or E;

[0153] X₅₇ is S or N;

[0154] X₅₈ is Q, E, K or S;

[0155] X₅₉ is E, D or Q;

[0156] X₆₀ is A or V;

[0157] X₆₁ is S or A;

[0158] X₆₂ is S or N;

[0159] X₆₃ is I or T;

[0160] X₆₄ is F or L;

[0161] X₆₅ is K, Q or L;

[0162] X₆₆ is T or A;

[0163] X₆₉ is T or S;

[0164] X₇₀ is I or M; and

[0165] X₇₁ is A, S or D.

[0166] In some cases, peptides can include all or a portion of the human proGN prosequence. Thus, peptides can include peptides having the sequence:

(SEQ ID NO: 13)
VTVQDGNFSFSLESVKKLKDLQEPQEPRVGKLRNFAPIPGEPVVPILCSN
PNFPEELKPLCKEPNAQEILQRLEEIAED.

[0167] In some cases, peptides can include all or a portion of SEQ ID NO:15933 that is related to the prosequence of human proguanylin. Thus, the peptides disclosed herein include peptides comprising (or consisting of or consisting essentially of) at least 10 contiguous amino acid of a polypeptide having the sequence:

(SEQ ID NO: 15933)
X₁ X₂ X₃ X₄ X₅ X₆ X₇ X₈ X₉ X₁₀ X₁₁ L E X₁₄ V K X₁₇
L X₁₉ X₂₀ L X₂₂ X₂₃ X₂₄ X₂₅ X₂₆ X₂₇ X₂₈ X₂₉ X₃₀ X₃₁
X₃₂ X₃₃ X₃₄ X₃₅ X₃₆ X₃₇ X₃₈ X₃₉ X₄₀ X₄₁ X₄₂ X₄₃ X₄₄
X₄₅ X₄₆ X₄₇ X₄₈ X₄₉ X₅₀ C X₅₂ X₅₃ X₅₄ X₅₅ X₅₆ X₅₇ P
X₅₉ X₆₀ X₆₁ X₆₂ P X₆₄ X₆₆ X₆₇ X₆₈ X₆₉ X₇₀ X₇₁ X₇₂
X₇₃ X₇₄ X₇₅ R L X₇₈ X₇₉ X₈₀ X₈₁ X₈₂ X₈₃

wherein:

[0168] X₁ is V or S;

[0169] X₂ is T, L, I, Y or E;

[0170] X₃ is V or F;

[0171] X₄ is Q or K;

[0172] X₅ is D or E;

[0173] X₆ is G or N;

[0174] X₇ is D, N, E or G;

[0175] X₈ is For L;

[0176] X₉ is S, T or K;

[0177] X₁₀ is F or Y;

[0178] X₁₁ is S or P;

[0179] X₁₄ is S or A;

[0180] X₁₇ is K, Q or R;

[0181] X₁₉ is K or H;

[0182] X₂₀ is D, E, A, H or G;

[0183] X₂₂ is Q, R, G, M, A;

[0184] X₂₃ is E, Q or D;

[0185] X₂₄ is A, S, E, V, L or P;

[0186] X₂₅ is Q, N, P, G or S;

[0187] X₂₆ is E, K, M or V;

[0188] X₂₇ is G, L or is missing;

[0189] X₂₈ is Q, S, R, A or is missing;

[0190] X₂₉ is E, K, S, A or is missing;

[0191] X₃₀ is P, V, M or A;

[0192] X₃₁ is R, Q, T, I, A or is missing;

[0193] X₃₂ is L, V, I, G, N or S;

[0194] X₃₃ is P, G, R, V, M, A, P;

[0195] X₃₄ is S, R or K;

[0196] X₃₅ is H, L, I, N or K;

[0197] X₃₆ is R, K or is missing;

[0198] X₃₇ is N, K or is missing;

[0199] X₃₈ is F or is missing;

[0200] X₃₉ is A or is missing;

[0201] X₄₀ is P, L or is missing;

[0202] X₄₁ is I, R or is missing;

[0203] X₄₂ is L, P, F, V, R or is missing;

[0204] X₄₃ is G, V, D, P, L, A or is missing;

[0205] X₄₄ is G, E, K, A, Q, R or S;

[0206] X₄₅ is P, S, H or K;

[0207] X₄₆ is V, I, P, A or Q;

[0208] X₄₇ is A, V, I, A, L, G or T;

[0209] X₄₈ is P, A, S, Y or is missing;

[0210] X₄₉ is I, Q, V, N, G, E, H, S or F;

[0211] X₅₀ is L, A or P;

[0212] X₅₂ is S, N, A, Q or G;

[0213] X₅₃ is S or missing;

[0214] X₅₄ is H, N, D, S, L, F, or Q;

[0215] X₅₅ is P, S, L or K;

[0216] X₅₆ is A, K, N, T, G, or Q;

[0217] X₅₇ is For L;

[0218] X₅₉ is E, K or Q;

[0219] X₆₀ is E, A or D;

[0220] X₆₁ is L or F;

[0221] X₆₂ is K, R, Q or L;

[0222] X₆₄ is L, I or V;

[0223] X₆₆ is K, E, Q, T or R;

[0224] X₆₇ is E, K, R or Q;

[0225] X₆₈ is P, S, E or R;

[0226] X₆₉ is N, D or G;

[0227] X₇₀ is A or S;

[0228] X₇₁ is E, Q, P, A or S;

[0229] X₇₂ is E, D, Q, M or A;

[0230] X₇₃ is I, A, or S;

[0231] X₇₄ is L, F or V;

[0232] X₇₅ is Q, E, D, N, G or A;

[0233] X₇₈ is E, A, G or C;

[0234] X₇₉ is E, A, V, S, L or M;

[0235] X₈₀ is I or V;

[0236] X₈₁ is A or P;

[0237] X₈₂ is E, Q, A or S;

[0238] X₈₃ is D or E; and wherein the mature and prosequences are separated by one or more methionine residues.

[0239] In some cases, the peptides described herein can include all or a portion of a peptide that is, or is related to, circulating uroguanylin. Thus, the peptides disclosed herein can include peptides having the sequence:

| | |
|---|---|
| FKTLRTIANDDCELCVNVACTGCL. | (SEQ ID NO: 14) |

[0240] In some cases, peptides can include all or a portion of SEQ ID NO:199. Thus, the peptides disclosed herein include a peptides comprising (or consisting of or consisting essentially of) at least 10 contiguous amino acid of a polypeptide having the sequence (SEQ ID NO:199):

X₁ X₂ X₃ X₄ X₅ L R X₆ X₇ X₈ Z₂ X₉ D X₁₀ C E L C X₁₁
N V AC₁₂T₁₃G₁₄C₁₅L₁₆,

wherein:

[0241] X₁ is S or N or is absent;

[0242] X₂ is I or T or is absent;

[0243] X₃ is F or L or is absent;

[0244] X₄ is K, Q or L or is absent;

[0245] X₅ is T or A or is absent;

[0246] X₆ is T or S or is absent;

[0247] X₇ is I or M or is absent;

[0248] X₈ is A, S or D or is absent;

[0249] Z₂ is one or more M or is absent;

[0250] X₉ is N, T, G or Q;

[0251] X₁₀ is D or E;

[0252] X₁₁ is V or I;

[0253] C₁₂ is present or absent;

[0254] T₁₃ is present or absent;

[0255] G₁₄ is present or absent;

[0256] C₁₅ is present or absent; and

[0257] L₁₆ is present or absent.

[0258] In some cases, the peptides can include all or a portion of a peptide that is, or is related to, the mature guanylin portion of human proguanylin. For example, useful polypeptides can include all or a portion of the sequences:

(SEQ ID NO: 15)
P G T C E I C A Y A A C T G C X₁₀₀,

wherein

[0259] X₁₀₀ is F or is missing; or

(SEQ ID NO: 16)
P X₈₆ X₈₇ C E I C A X₉₃ A A C X₉₇ G C X₁₀₀,

wherein

[0260] X₈₆ is G, S, R, or N;

[0261] X₈₇ is S or T;

[0262] X₉₃ is Y or F;

[0263] X₉₇ is T or A; and

[0264] X₁₀₀ is F or is missing.

[0265] In some cases, the peptides described herein include peptides or salts thereof comprising the amino acid sequence:

[0266] A₁′-B₁′-C₁′, wherein:

[0267] A₁′ is an amino acid sequences comprising (including, e.g., consisting of or consisting essentially of) a pre sequence depicted in FIG. 10, or an amino acid sequence comprising (including, e.g., consisting of or consisting essentially of) mnafllsalc llgawaalag gvtvqdgnfs fslesvkklk dlqepqepry gklrnfapip gepvvpilcs npnfpeelkp lckepnaqei lqrleeiaed (SEQ ID NO:17), mgcraasgll pgvavvllll lqstqsvyiq yqgfrvqles mkklsdleaq wapsprlqaq sllpavchhp alpqdlqpvc asqeassifk tlrtia (SEQ ID NO:18), lrtia (SEQ ID NO:19), mnawllsvlc llgalavlve gvtvqdgdls fplesvkqlk hlrevqeptl mshkkfalrl pkpvapelcs qsafpealrp lcekpnaeei lqrleaiaqd (SEQ ID NO:20), and msgsqlwaav llllvlqsaq gvyikyhgfq vqlesvkkln eleekqmsdp qqqksgllpd vcynpalpld lqpvcasqea astfkalrti a (SEQ ID NO:21) or a bacterial leader sequence such as: mkksilfiflsvlsfspfaqdakpvesskekitleskkcniakksnksgpesmn (SEQ ID NO:22), or is missing;

[0268] B₁′ is an amino acid sequences comprising (including, e.g., consisting of or consisting essentially of) a pro sequence depicted in FIG. 10, represented by SEQ ID NO:11, SEQ ID NO:12, SEQ ID NO:13, SEQ ID NO:14, or is missing;

[0269] C₁′ is an amino acid sequences comprising (including, e.g., consisting of or consisting essentially of) a GC-C receptor agonist polypeptide amino acid sequence depicted in FIG. 10, represented by SEQ ID NO:9, SEQ ID NO:10, SEQ ID NO:14_{A}; SEQ ID NO:15, or SEQ ID NO:16; and

[0270] wherein one or more of A₁′-B₁′-C₁′ are separated by one or more methionine residues (Z₂). For example, the peptide described herein is a polypeptide or a salt thereof comprising (including, e.g., consisting of or consisting essentially of) an amino acid sequence selected from Table 1.

TABLE 1
Guanylin and Uroguanylin Polypeptide Sequences

| Row | A₁′ | Z₂ | B₁′ | Z₂ | C₁′ |
|---|---|---|---|---|---|
| 1 | X | X or O | X | X or O | X |
| 2 | X | X | X | O | X |
| 3 | X | O | X | X | X |
| 4 | X | O | O | X | X |
| 5 | O | O | X | X | X |

[0271] Wherein X indicates that the amino acid or amino acid sequence is present and O indicates the amino acid or amino acid sequence is absent. Thus, row 4 indicates a peptide having the sequence: A₁′-Z₂-C₁′.

[0272] In some cases, described herein are purified prouroguanylin polypeptides comprising (or consisting of or consisting essentially of): (1) at least 10 contiguous amino acids of a presequence (e.g., depicted in FIG. 10, or SEQ ID NO:17, SEQ ID NO:18; SEQ ID NO:19, SEQ ID NO:20, SEQ ID NO:21, or SEQ ID NO:22); (2) at least 10 contiguous amino acids of a prosequence (e.g., depicted in FIG. 10, or SEQ ID NO: 11, SEQ ID NO:12, SEQ ID NO:13, or SEQ ID NO:14); and (3) at least 10 contiguous amino acids of a mature UGN sequence (e.g., depicted in FIG. 10, or SEQ ID NO:9 or SEQ ID NO:10), wherein the polypeptide consists includes at least: a portion of (1), (2), and at least a portion of (3), and wherein at least one of (1) and (2) or (2) and (3) are separated by one or more methionine residues.

[0273] In some cases, described herein are purified prouroguanylin polypeptides comprising (or consisting of or consisting essentially of): (1) at least 10 contiguous amino acids of a presequence (e.g., depicted in FIG. 10, or SEQ ID NO:17, SEQ ID NO:18; SEQ ID NO:19, SEQ ID NO:20, SEQ ID NO:21, or SEQ ID NO:22); (2) at least 10 contiguous amino acids of a prosequence (e.g., depicted in FIG. 10, or SEQ ID NO: 11, SEQ ID NO:12, SEQ ID NO:13, or SEQ ID NO:14); and (3) at least 10 contiguous amino acids of a mature GN sequence (e.g., depicted in FIG. 10, or SEQ ID NO:15 or SEQ ID NO:16), wherein the polypeptide consists includes at least: a portion of (1), (2), and at least a portion of (3), and wherein at least one of (1) and (2) or (2) and (3) are separated by one or more methionine residues.

[0274] In some cases, the peptides described herein are capable of binding and/or activating the GC-C receptor.

[0275] ST and Related Peptides

[0276] ST peptides, which are produced by a variety of bacteria, bind to and activate the human GC-C receptor.

[0277] In bacteria, ST peptides are derived from a preproprotein that generally has at least 70 amino acids. The pre and pro regions are cleaved as part of the secretion process, and the resulting mature peptide, which generally includes fewer than 20 amino acids, is biologically active.

[0278] Among the known bacterial ST peptides are: E. coli ST Ib (Moseley et al. 1983 Infect. Immun. 39:1167) having the mature amino acid sequence Asn Ser Ser Asn Tyr Cys Cys Glu Leu Cys Cys Asn Pro Ala Cys Thr Gly Cys Tyr (SEQ ID NO:34); E. coli ST Ia (So and McCarthy 1980 Proc. Natl. Acad. Sci. USA 77:4011) having the mature amino acid sequence Asn Thr Phe Tyr Cys Cys Glu Leu Cys Cys Asn Pro Ala Cys Ala Gly Cys Tyr (SEQ ID NO:35). E. coli ST I* (Chan and Giannella 1981 J. Biol. Chem. 256:7744) having the mature amino acid sequence Asn Thr Phe Tyr Cys Cys Glu Leu Cys Cys Tyr Pro Ala Cys Ala Gly Cys Asn (SEQ ID NO:36); C. freundii ST peptide (Guarino et al. 1989b Infect. Immun. 57:649) having the mature amino acid sequence Asn Thr Phe Tyr Cys Cys Glu Leu Cys Cys Asn Pro Ala Cys Ala Gly Cys Tyr (SEQ ID NO:35); Y. enterocolitica ST peptides, Y-ST(Y-STa), Y-STb, and Y-STc (reviewed in Huang et al. 1997 Microb. Pathog. 22:89) having the following pro-form amino acid sequences: Gln Ala Cys Asp Pro Pro Ser Pro Pro Ala Glu Val Ser Ser Asp Trp Asp Cys Cys Asp Val Cys Cys Asn Pro Ala Cys Ala Gly Cys (SEQ ID NO:27) (as well as a Ser-7 to Leu-7 variant of Y-STa (SEQ ID NO:28), (Takao et al. 1985 Eur. J. Biochem. 152:199)); Lys Ala Cys Asp Thr Gln Thr Pro Ser Pro Ser Glu Glu Asn Asp Asp Trp Cys Cys Glu Val Cys Cys Asn Pro Ala Cys Ala Gly Cys (SEQ ID NO:29); Gln Glu Thr Ala Ser Gly Gln Val Gly Asp Val Ser Ser Ser Thr Ile Ala Thr Glu Val Ser Glu Ala Glu Cys Gly Thr Gln Ser Ala Thr Thr Gln Gly Glu Asn Asp Trp Asp Trp Cys Cys Glu Leu Cys Cys Asn Pro Ala Cys Phe Gly Cys (SEQ ID NO:30), respectively; Y. kristensenii ST peptide having the mature amino acid sequence Ser Asp Trp Cys Cys Glu Val Cys Cys Asn Pro Ala Cys Ala Gly Cys (SEQ ID NO:31); V. cholerae non-01 ST peptide (Takao et al. (1985) FEBS lett. 193:250) having the mature amino acid sequence Ile Asp Cys Cys Glu Ile Cys Cys Asn Pro Ala Cys Phe Gly Cys Leu Asn (SEQ ID NO:32); and V. mimicus ST peptide (Arita et al. 1991 FEMS Microbiol. Lett. 79:105) having the mature amino acid sequence Ile Asp Cys Cys Glu Ile Cys Cys Asn Pro Ala Cys Phe Gly Cys Leu Asn (SEQ ID NO:33). Table 2 below provides sequences of all or a portion of a number of mature ST peptides and analogs thereof. Such peptides and peptides comprising these peptides are useful GCC agonists.

[0279] Useful polypeptides can include a naturally-occurring bacterial ST polypeptide in its mature form, as a preproprotein (includes, from amino terminus to carboxy terminus, pre sequence, pro sequence and mature peptide), as a proprotein (includes, from amino terminus to carboxy terminus, pro sequence and mature peptide) or as a prepeptide (includes, from amino terminus to carboxy terminus, pre sequence and mature peptode). FIG. 9 depicts these various bacterial ST polypeptides.

[0280] Mature ST peptides include, in some cases, an N-terminal non-core sequence and a C-terminal non-core sequence. In some cases, one or both of these non-core sequences can be removed and the peptide will still be able to bind and activate the GC-C receptor.

[0281] Various bacterial ST peptides are presented in Table 2, below.

TABLE 2
Bacterial ST

| GenBank ® | | |
|---|---|---|
| Accession | GenBank ® | |
| No. | GI No. | Sequence (SEQ ID NOs: 34-59) |
| QHECIB | 69638 | NSSNYCCELCCNPACTGCY |
| | | (SEQ ID NO: 34) |
| P01559 | 123711 | NTFYCCELCCNPACAGCY |
| | | (SEQ ID NO: 35) |
| AAA24653 | 147878 | NTFYCCELCCNPACAPCY |
| | | (SEQ ID NO: 36) |
| P01560 | 123707 | NTFYCCELCCYPACAGCN |
| | | (SEQ ID NO: 37) |
| AAA27561 | 295439 | IDCCEICCNPACFGCLN |
| | | (SEQ ID NO: 38) |
| P04429 | 123712 | IDCCEICCNPACFGCLN |
| | | (SEQ ID NO: 39) |
| S34671 | 421286 | IDCCEICCNPACF |
| | | (SEQ ID NO: 40) |
| CAA52209 | 395161 | IDCCEICCNPACFG |
| | | (SEQ ID NO: 41) |
| A54534 | 628844 | IDCCEICCNPACFGCLN |
| | | (SEQ ID NO: 42) |
| AAL02159 | 15592919 | IDRCEICCNPACFGCLN |
| | | (SEQ ID NO: 43) |
| AAA18472 | 487395 | DWDCCDVCCNPACAGC |
| | | (SEQ ID NO: 44) |
| S25659 | 282047 | DWDCCDVCCNPACAGC |
| | | (SEQ ID NO: 45) |
| P74977 | 3913874 | NDDWCCEVCCNPACAGC |
| | | (SEQ ID NO46: ) |
| BAA23656 | 2662339 | WDWCCELCCNPACFGC |
| | | (SEQ ID NO: 47) |
| P31518 | 399947 | SDWCCEVCCNPACAGC |
| | | (SEQ ID NO: 48) |
| | | QACDPPSPPAEVSSDWDCCDVCCDPACAGC |
| | | (SEQ ID NO: 49) |
| | | QACDPPSPPAEVSSDWDCCDVCCNPACAGC |
| | | (SEQ ID NO: 50) |
| | | KACDTQTPSPSEENDDTCCEVCCNPACAGC |
| | | (SEQ ID NO: 51) |
| | | QETASGQVGDVSSSTIATEVSEAECGTQSA |
| | | TTQGENDWDWCCELCCNPACFGC |
| | | (SEQ ID NO: 52) |
| | | MKKLMLAIFISVLSFPSFSQSTESLDS |
| | | SKEKITLETKKCDVVKNNSEKKSEN |
| | | MNNTFYCCELCCNPACAGCY |
| | | (SEQ ID NO: 53) |
| | | MKKSILFIFLSVLSFSPFAQDAKPVES |
| | | SKEKITLESKKCNIAKKSNKSGPESM |
| | | NSSNYCCELCCNPACTGCY |
| | | (SEQ ID NO: 54) |
| | | MKKIVFVLVLMLSSFGAFGQETVSG |
| | | QFSDALSTPITAEVYKQACDPPLPPA |
| | | EVSSDWDCCDVCCNPACAGC |
| | | (SEQ ID NO: 55) |
| | | GNLIDCCEICCNPACFGCLN |
| | | (SEQ ID NO: 56) |
| | | GNLIDRCEICCNPACFGCLN |
| | | (SEQ ID NO: 57) |
| | | PPAEVSSDWDCCDVCCNPACAGC |
| | | (SEQ ID NO: 58) |
| | | NYCCELCCNPACTGCF |
| | | (SEQ ID NO: 59) |

[0282] The immature (including pre and pro regions) form of E. coli ST-1A (ST-P) protein has the sequence: mkklmlaifisvlsfpsfsqstesldsskekitletkkcdvvknnsekksenmnntfyccelccnpacagcy (SEQ ID NO:60; see GenBank® Accession No. P01559 (gi:123711). The pre sequence extends from aa 1-19. The pro sequence extends from aa 20-54. The mature protein extends from 55-72. The immature (including pre and pro regions) form of E. coli ST-1B (ST-H) protein has the sequence: mkksilfiflsvlsfspfaqdakpvesskekitleskkcniakksnksgpesmnssnyccelccnpactgcy (SEQ ID NO:61; see GenBank® Accession No. P07965 (gi:3915589)). The immature (including pre and pro regions) form of Y. enterocolitica ST protein has the sequence: mkkivfvlvlmlssfgafgqetvsgqfsdalstpitaevykqacdpplppaevssdwdccdvccnpacagc (SEQ ID NO:62; see GenBank® Accession No. S25659 (gi:282047)).

[0283] The bacterial ST peptides have six Cys residues. These six Cys residues form three disulfide bonds in the mature and active form of the peptide. If the six Cys residues are identified, from the amino to carboxy terminus of the peptide, as A, B, C, D, E, and F, then the disulfide bonds form as follows: A-D, B-E, and C-F. The formation of these bonds is thought to be important for GC-C receptor binding.

[0284] In some cases, the ST-related peptide described herein is a polypeptide or a salt thereof comprising the amino acid sequence:
[0285] A′-B′-C′-D′-E′

[0286] wherein:

[0287] A′ is an amino acid sequence comprising (including, e.g., consisting of or consisting essentially of) a pre sequence depicted in FIG. 9 or is missing;

[0288] B′ is an amino acid sequence comprising (including, e.g., consisting of or consisting essentially of) a pro sequence depicted in FIG. 9 or is missing;

[0289] C′ is an amino acid sequence comprising (including, e.g., consisting of or consisting essentially of) an N-terminal non-core sequence depicted in FIG. 9 or is missing;

[0290] D′ is an amino acid sequence comprising (including, e.g., consisting of or consisting essentially of) a GC-C receptor agonist polypeptide amino acid sequence;

[0291] E′ is an amino acid sequence comprising (including, e.g., consisting of or consisting essentially of) a C-terminal non-core sequence depicted in FIG. 9 or is missing; and

[0292] wherein one or more of A′-B′, B′-C′, and/or C′-D are separated by one or more methionine residues (Z₂). For example, the peptide described herein is a polypeptide or a salt thereof comprising (including, e.g., consisting of or consisting essentially of) an amino acid sequence selected from Table 3.

TABLE 3
ST Polypeptide Sequences

| Row | A′ | Z₂ | B′ | Z₂ | C′ | Z₂ | D′ | E′ |
|---|---|---|---|---|---|---|---|---|
| 1 | X | X | X | X | ◯ | ◯ | X | ◯ |
| 2 | X | X | X | X | X | ◯ | X | X |
| 3 | X | X | X | X | X | X | X | X |
| 4 | X | X | X | X | X | ◯ | X | ◯ |
| 5 | X | X | X | X | ◯ | ◯ | X | X |
| 6 | ◯ | X | X | X | ◯ | ◯ | X | ◯ |
| 7 | ◯ | X | X | X | X | ◯ | X | X |
| 8 | ◯ | X | X | X | X | X | X | X |
| 9 | ◯ | X | X | X | X | ◯ | X | ◯ |
| 10 | ◯ | X | X | X | ◯ | ◯ | X | X |
| 11 | X | ◯ | X | X | ◯ | ◯ | X | ◯ |
| 12 | X | ◯ | X | X | X | ◯ | X | X |
| 13 | X | ◯ | X | X | X | X | X | X |
| 14 | X | ◯ | X | X | X | ◯ | X | ◯ |
| 15 | X | ◯ | X | X | ◯ | ◯ | X | X |
| 16 | X | X | X | ◯ | ◯ | ◯ | X | ◯ |
| 17 | X | X | X | ◯ | X | ◯ | X | X |
| 18 | X | X | X | ◯ | X | X | X | X |
| 19 | X | X | X | ◯ | X | ◯ | X | ◯ |
| 20 | X | X | X | ◯ | ◯ | ◯ | X | X |
| 21 | ◯ | ◯ | X | X | ◯ | ◯ | X | ◯ |
| 22 | ◯ | ◯ | X | X | X | ◯ | X | X |
| 23 | ◯ | ◯ | X | X | X | X | X | X |
| 24 | ◯ | ◯ | X | X | X | ◯ | X | ◯ |
| 25 | ◯ | ◯ | X | X | ◯ | ◯ | X | X |
| 26 | X | X | ◯ | ◯ | ◯ | ◯ | X | ◯ |
| 27 | X | X | ◯ | ◯ | X | ◯ | X | X |
| 28 | X | X | ◯ | ◯ | X | X | X | X |
| 29 | X | X | ◯ | ◯ | X | ◯ | X | ◯ |
| 30 | X | X | ◯ | ◯ | ◯ | ◯ | X | X |
| 31 | ◯ | ◯ | ◯ | X | ◯ | ◯ | X | ◯ |
| 32 | ◯ | ◯ | ◯ | X | X | ◯ | X | X |
| 33 | ◯ | ◯ | ◯ | X | X | X | X | X |
| 34 | ◯ | ◯ | ◯ | X | X | ◯ | X | ◯ |
| 35 | ◯ | ◯ | ◯ | X | ◯ | ◯ | X | X |

Wherein X indicates that the amino acid or amino acid sequence is present and O indicates that the amino acid or amino acid sequence is absent. Thus, row 1 in Table 3 indicates a protein comprising the sequence: A′-Z₂-B′-Z₂-D′ and row 11 indicates a protein having the sequence: A′-B′-Z₂-D′

[0293] Alternatively or in addition, the peptide described herein is a peptide or a salt thereof comprising (including, e.g., consisting of or consisting essentially of) the amino acid sequence:
[0294] A′-B′-Z₂-D′;
[0295] A′-Z₂-D′; and/or
[0296] B′-Z₂-D′;

[0297] wherein in each amino acid sequence C′ and/or E′ are present or are missing and Z₂ consists of one or more methionine residues.

[0298] In some cases, each occurrence of Z₂ represents one methionine residue.

[0299] In some cases: D′ comprises the amino acid sequence Xaa₁ Xaa₂ Xaa₃ Xaa₄ Xaa₅ Cys₆ Cys₇ Xaa₈ Xaa₉ Cys₁₀ Cys₁₁ Xaa₁₂ Xaa₁₃ Xaa₁₄ Cys₁₅ Xaa₁₆ Xaa₁₇ Cys₁₈ Xaa₁₉ Xaa₂₀ Xaa₂₁ (SEQ ID NO: 63) wherein:
[0300] Xaa₈, Xaa₉, Xaa₁₂, Xaa₁₃, Xaa₁₄, Xaa₁₆ and Xaa₁₇ are independently any amino acid;
[0301] Xaa₁, Xaa₂, Xaa₃, Xaa₄ and Xaa₅ are independently any amino acid or one or more amino acids within the sequence Xaa₁ Xaa₂ Xaa₃ Xaa₄ Xaa₅ is missing;
[0302] Xaa₁₉, Xaa₂₀ and Xaa₂₁ are independently any amino acid or one or more amino acids within the sequence Xaa₁₉ Xaa₂₀ Xaa₂₁ is missing; or the sequence Xaa₂₀ Xaa₂₁ is missing and Xaa₁₉ is any amino acid, or the sequence Xaa₂₀ Xaa₂₁ is missing and Xaa₁₉ is Tyr;

[0303] the sequence Xaa₁ Xaa₂ Xaa₃ Xaa₄ Xaa₅ is missing;

[0304] Xaa₁₉ Xaa₂₀ Xaa₂₁ is missing or the sequence Xaa₂₀ Xaa₂₁ is missing and;
[0305] Xaa₁₉ is Tyr;
[0306] Xaa₈ is Glu;
[0307] Xaa₉ is Leu, Tyr, Phe or Trp;
[0308] Xaa₁₂ is Asn;
[0309] Xaa₁₃ is Pro;
[0310] Xaa₁₄ is Ala;
[0311] Xaa₁₆ is Thr; and
[0312] Xaa₁₇ is Gly.

[0313] In some cases of SEQ ID NO:63, Xaa₁, Xaa₂, Xaa₃, Xaa₄, Xaa₅, Xaa₈, Xaa₉, Xaa₁₂, Xaa₁₃, Xaa₁₄, Xaa₁₆, Xaa₁₇, Xaa₁₉, Xaa₂₀ and Xaa₂₁ are any amino acid, e.g., Ala, Arg, Asn, Asp, Cys, Gln, Glu, Gly, His, Ile, Leu, Lys, Met, Phe, Pro, Ser, Thr, Trp, Tyr, and Val. In some cases, of SEQ ID NO:63, the sequence Xaa₁ Xaa₂ Xaa₃ Xaa₄ Xaa₅ is missing. In some cases of SEQ ID NO:63, the sequence Xaa₁₉ Xaa₂₀ Xaa₂₁ is missing or the sequence Xaa₂₀ Xaa₂₁ is missing and Xaa₁₉ is Tyr. In some cases of SEQ ID NO:63, Xaa₁ Xaa₂ Xaa₃ Xaa₄ Xaa₅ is missing, the sequence Xaa₂₀ Xaa₂₁ is missing and Xaa₁₉ is Tyr.

[0314] In some cases of SEQ ID NO: 63: Xaa₁ Xaa₂ Xaa₃ Xaa₄ Xaa₅ is Asn Ser Ser Asn Tyr or is missing or Xaa₁ Xaa₂ Xaa₃ Xaa₄ is missing.

[0315] In some cases of SEQ ID NO: 63: Xaa₈, Xaa₉, Xaa₁₂, Xaa₁₄, Xaa₁₆, Xaa₁₇, and Xaa₁₉ can be any amino acid. In some cases of SEQ ID NO:63, Xaa₈, Xaa₉, Xaa₁₂, Xaa₁₄, Xaa₁₆, Xaa₁₇, and Xaa₁₉ can be any natural or non-natural amino acid or amino acid analog.

[0316] In some cases of SEQ ID NO: 63: Xaa₅ is Asn, Trp, Tyr, Asp, or Phe. In other cases, Xaa₅ can also be Thr or Ile. In other cases, Xaa₅ is Tyr, Asp or Trp. In certain cases Xaa₅ is Asn, Trp, Tyr, Asp, Ile, Thr or Phe. In some cases, Xaa₅ is Asn.

[0317] In some cases of SEQ ID NO: 63: Xaa₈ is Glu, Asp, Gln, Gly or Pro. In other cases Xaa₈ is Glu. In other cases Xaa₈ is Glu or Asp. In others it is Asn, Glu, or Asp. In others it is Glu, His, Lys, Gln, Asn, or Asp. In others it is Glu, His, Gln, Asn, or Asp. In others it is Glu, Asn, His, Gln, Lys, Asp or Ser. In still others it is Pro. In certain cases it is any natural or non-natural amino acid or amino acid analog.

[0318] In some cases of SEQ ID NO: 63: Xaa₉ is Leu, Ile, Val, Ala, Lys, Arg, Trp, Tyr or Phe. In some cases Xaa₉ is Leu, Ile, Val, Lys, Arg, Trp, Tyr or Phe. In others it is Leu, Ile, Val, Trp, Tyr or Phe. In others it is Leu, Ile or Val. In others it is Trp, Tyr or Phe. In others it is Leu, Ile, Lys, Arg, Trp, Tyr, or Phe. In others it is Leu, Val, Ile, or Met. In others it is Leu or Phe. In others it is Leu, Phe, or Tyr. In others it is Tyr, Phe or His. In others it is Phe, His, Trp, or Tyr. In certain cases, Xaa₉ is not Leu. In others it is Tyr. In other cases it is any natural or non-natural aromatic amino acid or amino acid analog. In certain cases it is any natural or non-natural amino acid or amino acid analog.

[0319] In certain cases of SEQ ID NO: 63: Xaa₁₂ is Asn, Tyr, Asp or Ala. In others it is Asn. In others it is Asn, Met, Arg, Lys, His, or Gln. In others it is Asn, Lys, His, or Gln. In others it is Asn, Asp, Glu or Gln. In others it is Asn, Thr, Ser, Arg, Lys, Gln, or His. In others it is Asn, Ser, or His. In certain cases it is any natural or non-natural amino acid or amino acid analog.

[0320] In certain cases of SEQ ID NO: 63: Xaa₁₃ is Ala, Pro or Gly. In others it is Pro or Gly. In others it is Pro and in still others it is Gly.

[0321] In certain cases of SEQ ID NO: 63: Xaa₁₄ is Ala, Leu, Ser, Gly, Val, Glu, Gln, Ile, Leu, Thr, Lys, Arg, or Asp. In others it is Ala or Gly. In others it is Val or Ala. In others it is Ala or Thr. In others it is Ala. In others it is Val, Gln, Asn, Glu, Asp, Thr, or Ala. In others it is Gly, Cys or Ser. In still others it is Thr. In certain cases it is any natural or non-natural amino acid or amino acid analog.

[0322] In certain cases of SEQ ID NO: 63: Xaa₁₆ is Thr, Ala, Asn, Lys, Arg, Trp, Gly or Val. In others it is Thr, Ala, Asn, Lys, Arg or Trp. In others it is Thr, Ala, Lys, Arg or Trp. In certain cases it is Thr, Ala or Trp. In others it is Thr. In certain cases it is Trp, Tyr or Phe. In certain cases it is Thr or Ala. In certain cases it is Val. In certain cases it is Gly. In others it is Thr, Ser, Met or Val. In others it is Val, Ala, or Thr. In others it is Ile, Val, Lys, Asn, Glu, Asp, or Thr. In certain cases it is any natural or non-natural amino acid or amino acid analog. In certain cases it is any natural or non-natural non-aromatic amino acid or amino acid analog.

[0323] In certain cases of SEQ ID NO: 63: Xaa₁₇ is Gly, Pro or Ala. In certain cases it is Gly. In certain cases it is Ala. In others it is Gly or Ala. In others it is Gly, Asn, Ser or Ala. In others it is Asn, Glu, Asp, Thr, Ala, Ser, or Gly. In others it is Asp, Ala, Ser, or Gly. In certain cases it is any natural or non-natural amino acid or amino acid analog.

[0324] In certain cases of SEQ ID NO: 63: Xaa₁₉ is Trp, Tyr, Phe, Asn, Ile, Val, His, Leu, or Arg. In certain cases it is Tip, Tyr, Asn or Leu. In certain cases it is Tip, Tyr or Phe. In others it is Tyr, Phe or His. In others it is Tyr or Trp. In others it is Tyr. In certain cases it is Leu, Ile or Val. In certain cases it is His. In certain cases it is Tip, Tyr, Phe, Asn, Ile, Val, His or Leu. In certain cases it is Trp, Tyr, Phe or Leu. In certain cases it is Tyr or Leu. In certain cases it is Lys or Arg. In certain cases it is any amino acid other than Pro, Arg, Lys, Asp or Glu. In certain cases it is any amino acid other than Pro. In certain cases it is any natural or non-natural amino acid or amino acid analog. In certain cases it is missing.

[0325] In certain cases of SEQ ID NO: 63: Xaa₂₀ is Asp or Asn. In certain cases Xaa₂₀ Xaa₂₁ is AspPhe or is missing or Xaa₂₀ is Asn or Glu and Xaa₂₁ is missing or Xaa₁₉ Xaa₂₀ Xaa₂₁ is missing.

[0326] In some cases, the peptides disclosed herein do not include the sequence of E. coli ST peptide. In other cases, the peptide does not include the sequence of any of the peptides in Table 2, above.

[0327] In certain cases D′ comprises the amino acid sequence SEQ ID NO: 64.

(SEQ ID NO: 64)
Xaa₁ Xaa₂ Xaa₃ Xaa₄ Xaa₅ Cys₆ Cys₇ Xaa₈ Xaa₉ Cys₁₀
Cys₁₁ Asn₁₂ Pro₁₃ Ala₁₄ Cys₁₅ Xaa₁₆ Gly₁₇ Cys₁₈
Xaa₁₉ Xaa₂₀ Xaa₂₁.

[0328] wherein Xaa₁ Xaa₂ Xaa₃ Xaa₄ Xaa₅ is Asn Ser Ser Asn Tyr or is missing or Xaa₁ Xaa₂ Xaa₃ Xaa₄ is missing and Xaa₅ is Asn;

[0329] Xaa₈ is Glu or Asp;

[0330] Xaa₉ is Leu, Ile, Val, Trp, Tyr or Phe;

[0331] Xaa₁₆ is Thr, Ala, Trp;

[0332] Xaa₁₉ is Trp, Tyr, Phe or Leu or is missing; and Xaa₂₀ Xaa₂₁ is AspPhe.

[0333] In various cases of SEQ ID NO:64: Xaa₉ is Leu, Ile or Val and Xaa₁₆ is Trp, Tyr or Phe; Xaa₉ is Trp, Tyr or Phe, and Xaa₁₆ is Thr or Ala; Xaa₁₉ is Trp, Tyr, Phe and Xaa₂₀ Xaa₂₁ is AspPhe; and Xaa₁ Xaa₂ Xaa₃ Xaa₄ is missing and Xaa₅ is Asn; the peptide comprises fewer than 50, 40, 30 or 25 amino acids; or fewer than five amino acids precede Cys₆.

[0334] In certain cases the peptide includes a peptide comprising or consisting of the amino acid sequence of SEQ ID NO:64 wherein Xaa₉ is any amino acid: wherein Xaa₉ is any amino acid other than Leu; wherein Xaa₉ is selected from Phe, Trp and Tyr; wherein Xaa₉ is selected from any other natural or non-natural aromatic amino acid; wherein Xaa₉ is Tyr; wherein Xaa₉ is Phe; wherein Xaa₉ is Trp; wherein Xaa₁ Xaa₂ Xaa₃ Xaa₄ Xaa₅ is Asn Ser Ser Asn Tyr; wherein Xaa₁, Xaa₂, Xaa₃, Xaa₄, and Xaa₅ are missing; wherein Xaa₁, Xaa₂, Xaa₃ and Xaa₄ are missing; wherein Xaa₁, Xaa₂ and Xaa₃ are missing; wherein Xaa₁ and Xaa₂ are missing; wherein Xaa₁ is missing; wherein Xaa₂₀ Xaa₂₁ is AspPhe or is missing or Xaa₂₀ is Asn or Glu and Xaa₂₁ is missing or Xaa₁₉ Xaa₂₀ Xaa₂₁ is missing; wherein Xaa₁ Xaa₂ Xaa₃ Xaa₄ Xaa₅ and Tyr Xaa₂₀ Xaa₂₁ are missing.

[0335] In the case of a peptide comprising the sequence of SEQ ID NO:63 wherein: Xaa₁ Xaa₂ Xaa₃ Xaa₄ Xaa₅ is missing and/or the sequence Xaa₁₉ Xaa₂₀ Xaa₂₁ is missing, the peptide can still contain additional carboxy terminal or amino terminal amino acids or both. In the case of peptides missing one or more terminal amino acids such as Xaa₁ or Xaa₂₁, the peptide can still contain additional carboxy terminal or amino terminal amino acids or both.

[0336] In certain cases, the peptide includes disulfide bonds between Cys₆ and Cys₁₁, between Cys₇ and Cys₁₅ and between Cys₁₀ and Cys₁₆. In other cases, the peptide is a reduced peptide having no disulfide bonds. In still other cases the peptide has one or two disulfide bonds chosen from: a disulfide bond between Cys₆ and Cys₁₁, a disulfide bond between Cys₇ and Cys₁₅ and a disulfide bond between Cys₁₀ and Cys₁₆.

[0337] In some cases, D′ comprises an amino acid sequence selected from (SEQ ID NOs:65-104, respectively, as shown below):

(SEQ ID NO: 65)
Cys Cys Glu Ala Cys Cys Asn Pro Ala Cys Thr Gly
Cys
(SEQ ID NO: 66)
Cys Cys Glu Arg Cys Cys Asn Pro Ala Cys Thr Gly
Cys
(SEQ ID NO: 67)
Cys Cys Glu Asn Cys Cys Asn Pro Ala Cys Thr Gly
Cys
(SEQ ID NO: 68)
Cys Cys Glu Asp Cys Cys Asn Pro Ala Cys Thr Gly
Cys
(SEQ ID NO: 69)
Cys Cys Glu Cys Cys Cys Asn Pro Ala Cys Thr Gly
Cys
(SEQ ID NO: 70)
Cys Cys Glu Gln Cys Cys Asn Pro Ala Cys Thr Gly
Cys
(SEQ ID NO: 71)
Cys Cys Glu Glu Cys Cys Asn Pro Ala Cys Thr Gly
Cys
(SEQ ID NO: 72)
Cys Cys Glu Gly Cys Cys Asn Pro Ala Cys Thr Gly
Cys
(SEQ ID NO: 73)
Cys Cys Glu His Cys Cys Asn Pro Ala Cys Thr Gly
Cys
(SEQ ID NO: 74)
Cys Cys Glu Ile Cys Cys Asn Pro Ala Cys Thr Gly
Cys
(SEQ ID NO: 75)
Cys Cys Glu Lys Cys Cys Asn Pro Ala Cys Thr Gly
Cys
(SEQ ID NO: 76)
Cys Cys Glu Met Cys Cys Asn Pro Ala Cys Thr Gly
Cys
(SEQ ID NO: 77)
Cys Cys Glu Phe Cys Cys Asn Pro Ala Cys Thr Gly
Cys
(SEQ ID NO: 78)
Cys Cys Glu Pro Cys Cys Asn Pro Ala Cys Thr Gly
Cys
(SEQ ID NO: 79)
Cys Cys Glu Ser Cys Cys Asn Pro Ala Cys Thr Gly
Cys
(SEQ ID NO: 80)
Cys Cys Glu Thr Cys Cys Asn Pro Ala Cys Thr Gly
Cys
(SEQ ID NO: 81)
Cys Cys Glu Trp Cys Cys Asn Pro Ala Cys Thr Gly
Cys
(SEQ ID NO: 82)
Cys Cys Glu Val Cys Cys Asn Pro Ala Cys Thr Gly
Cys
(SEQ ID NO: 83)
Cys Cys Glu Tyr Cys Cys Asn Pro Ala Cys Thr Gly
Cys
(SEQ ID NO: 84)
Cys Cys Glu Leu Cys Cys Asn Pro Ala Cys Thr Gly
Cys
(SEQ ID NO: 85)
Cys Cys Glu Ala Cys Cys Asn Pro Ala Cys Thr Gly
Cys Tyr
(SEQ ID NO: 86)
Cys Cys Glu Arg Cys Cys Asn Pro Ala Cys Thr Gly
Cys Tyr
(SEQ ID NO: 87)
Cys Cys Glu Asn Cys Cys Asn Pro Ala Cys Thr Gly
Cys Tyr
(SEQ ID NO: 88)
Cys Cys Glu Asp Cys Cys Asn Pro Ala Cys Thr Gly
Cys Tyr
(SEQ ID NO: 89)
Cys Cys Glu Cys Cys Cys Asn Pro Ala Cys Thr Gly
Cys Tyr
(SEQ ID NO: 90)
Cys Cys Glu Gln Cys Cys Asn Pro Ala Cys Thr Gly
Cys Tyr
(SEQ ID NO: 91)
Cys Cys Glu Glu Cys Cys Asn Pro Ala Cys Thr Gly
Cys Tyr
(SEQ ID NO: 92)
Cys Cys Glu Gly Cys Cys Asn Pro Ala Cys Thr Gly
Cys Tyr
(SEQ ID NO: 93)
Cys Cys Glu His Cys Cys Asn Pro Ala Cys Thr Gly
Cys Tyr
(SEQ ID NO: 94)
Cys Cys Glu Ile Cys Cys Asn Pro Ala Cys Thr Gly
Cys Tyr
(SEQ ID NO: 95)
Cys Cys Glu Lys Cys Cys Asn Pro Ala Cys Thr Gly
Cys Tyr
(SEQ ID NO: 96)
Cys Cys Glu Met Cys Cys Asn Pro Ala Cys Thr Gly
Cys Tyr
(SEQ ID NO: 97)
Cys Cys Glu Phe Cys Cys Asn Pro Ala Cys Thr Gly
Cys Tyr
(SEQ ID NO: 98)
Cys Cys Glu Pro Cys Cys Asn Pro Ala Cys Thr Gly
Cys Tyr
(SEQ ID NO: 99)
Cys Cys Glu Ser Cys Cys Asn Pro Ala Cys Thr Gly
Cys Tyr
(SEQ ID NO: 100)
Cys Cys Glu Thr Cys Cys Asn Pro Ala Cys Thr Gly
Cys Tyr
(SEQ ID NO: 101)
Cys Cys Glu Trp Cys Cys Asn Pro Ala Cys Thr Gly
Cys Tyr
(SEQ ID NO: 102)
Cys Cys Glu Val Cys Cys Ash Pro Ala Cys Thr Gly
Cys Tyr
(SEQ ID NO: 103)
Cys Cys Glu Tyr Cys Cys Asn Pro Ala Cys Thr Gly
Cys Tyr;
and
(SEQ ID NO: 104)
Cys Cys Glu Leu Cys Cys Asn Pro Ala Cys Thr Gly
Cys Tyr.

[0338] In various cases of the aforementioned polypeptides: D′ comprises (consists of or consists essentially of) an amino acid sequence selected from SEQ ID NOs:105-112, shown below, respectively):

| | |
|---|---|
| CCELCCNPACTGCY; | (SEQ ID NO: 105) |
| CCEYCCNPACTGCY; | (SEQ ID NO: 106) |
| CCEFCCNPACTGCY; | (SEQ ID NO: 107) |
| CCEWCCNPACTGCY; | (SEQ ID NO: 108) |
| CCELCCNPACTGC; | (SEQ ID NO: 109) |
| CCEYCCNPACTGC; | (SEQ ID NO: 110) |
| CCEFCCNPACTGC; | (SEQ ID NO: 111) |
| and | |
| CCEWCCNPACTGC. | (SEQ ID NO: 112) |

[0339] In some cases: D′ comprises an amino acid sequence selected from SEQ ID NOs: 113-806, respectively, as shown below:

| | |
|---|---|
| Gln Ser Ser Asn Tyr Cys Cys Glu Tyr Cys Cys Asn Pro Ala Cys Thr Gly Cys Tyr | (SEQ ID NO: 113) |
| Asn Thr Ser Asn Tyr Cys Cys Glu Tyr Cys Cys Asn Pro Ala Cys Thr Gly Cys Tyr | (SEQ ID NO: 114) |
| Asn Leu Ser Asn Tyr Cys Cys Glu Tyr Cys Cys Asn Pro Ala Cys Thr Gly Cys Tyr | (SEQ ID NO: 115) |
| Asn Ile Ser Asn Tyr Cys Cys Glu Tyr Cys Cys Asn Pro Ala Cys Thr Gly Cys Tyr | (SEQ ID NO: 116) |
| Asn Ser Ser Gln Tyr Cys Cys Glu Tyr Cys Cys Asn Pro Ala Cys Thr Gly Cys Tyr | (SEQ ID NO: 117) |
| Ser Ser Asn Tyr Cys Cys Glu Tyr Cys Cys Asn Pro Ala Cys Thr Gly Cys Tyr | (SEQ ID NO: 118) |
| Gln Ser Ser Gln Tyr Cys Cys Glu Tyr Cys Cys Asn Pro Ala Cys Thr Gly Cys Tyr | (SEQ ID NO: 119) |
| Ser Ser Gln Tyr Cys Cys Glu Tyr Cys Cys Asn Pro Ala Cys Thr Gly Cys Tyr. | (SEQ ID NO: 120) |
| Asn Ser Ser Asn Tyr Cys Cys Glu Ala Cys Cys Asn Pro Ala Cys Thr Gly Cys Tyr | (SEQ ID NO: 121) |
| Asn Ser Ser Asn Tyr Cys Cys Glu Arg Cys Cys Asn Pro Ala Cys Thr Gly Cys Tyr | (SEQ ID NO: 122) |
| Asn Ser Ser Asn Tyr Cys Cys Glu Asn Cys Cys Asn Pro Ala Cys Thr Gly Cys Tyr | (SEQ ID NO: 123) |
| Asn Ser Ser Asn Tyr Cys Cys Glu Asp Cys Cys Asn Pro Ala Cys Thr Gly Cys Tyr | (SEQ ID NO: 124) |
| Asn Ser Ser Asn Tyr Cys Cys Glu Cys Cys Cys Asn Pro Ala Cys Thr Gly Cys Tyr | (SEQ ID NO: 125) |
| Asn Ser Ser Asn Tyr Cys Cys Glu Gln Cys Cys Asn Pro Ala Cys Thr Gly Cys Tyr | (SEQ ID NO: 126) |
| Asn Ser Ser Asn Tyr Cys Cys Glu Glu Cys Cys Asn Pro Ala Cys Thr Gly Cys Tyr | (SEQ ID NO: 127) |
| Asn Ser Ser Asn Tyr Cys Cys Glu Gly Cys Cys Asn Pro Ala Cys Thr Gly Cys Tyr | (SEQ ID NO: 128) |
| Asn Ser Ser Asn Tyr Cys Cys Glu His Cys Cys Asn Pro Ala Cys Thr Gly Cys Tyr | (SEQ ID NO: 129) |
| Asn Ser Ser Asn Tyr Cys Cys Glu Ile Cys Cys Asn Pro Ala Cys Thr Gly Cys Tyr | (SEQ ID NO: 130) |
| Asn Ser Ser Asn Tyr Cys Cys Glu Lys Cys Cys Asn Pro Ala Cys Thr Gly Cys Tyr | (SEQ ID NO: 131) |
| Asn Ser Ser Asn Tyr Cys Cys Glu Met Cys Cys Asn Pro Ala Cys Thr Gly Cys Tyr | (SEQ ID NO: 132) |
| Asn Ser Ser Asn Tyr Cys Cys Glu Phe Cys Cys Asn Pro Ala Cys Thr Gly Cys Tyr | (SEQ ID NO: 133) |
| Asn Ser Ser Asn Tyr Cys Cys Glu Pro Cys Cys Asn Pro Ala Cys Thr Gly Cys Tyr | (SEQ ID NO: 134) |
| Asn Ser Ser Asn Tyr Cys Cys Glu Ser Cys Cys Asn Pro Ala Cys Thr Gly Cys Tyr | (SEQ ID NO: 135) |
| Asn Ser Ser Asn Tyr Cys Cys Glu Thr Cys Cys Asn Pro Ala Cys Thr Gly Cys Tyr | (SEQ ID NO: 136) |
| Asn Ser Ser Asn Tyr Cys Cys Glu Trp Cys Cys Asn Pro Ala Cys Thr Gly Cys Tyr | (SEQ ID NO: 137) |
| Asn Ser Ser Asn Tyr Cys Cys Glu Val Cys Cys Asn Pro Ala Cys Thr Gly Cys Tyr | (SEQ ID NO: 138) |
| Cys Cys Glu Ala Cys Cys Asn Pro Ala Cys Thr Gly Cys Tyr | (SEQ ID NO: 139) |
| Cys Cys Glu Arg Cys Cys Asn Pro Ala Cys Thr Gly Cys Tyr | (SEQ ID NO: 140) |
| Cys Cys Glu Asn Cys Cys Asn Pro Ala Cys Thr Gly Cys Tyr | (SEQ ID NO: 141) |
| Cys Cys Glu Asp Cys Cys Asn Pro Ala Cys Thr Gly Cys Tyr | (SEQ ID NO: 142) |
| Cys Cys Glu Cys Cys Cys Asn Pro Ala Cys Thr Gly Cys Tyr | (SEQ ID NO: 143) |
| Cys Cys Glu Gln Cys Cys Asn Pro Ala Cys Thr Gly Cys Tyr | (SEQ ID NO: 144) |
| Cys Cys Glu Glu Cys Cys Asn Pro Ala Cys Thr Gly Cys Tyr | (SEQ ID NO: 145) |
| Cys Cys Glu Gly Cys Cys Asn Pro Ala Cys Thr Gly Cys Tyr | (SEQ ID NO: 146) |
| Cys Cys Glu His Cys Cys Asn Pro Ala Cys Thr Gly Cys Tyr | (SEQ ID NO: 147) |
| Cys Cys Glu Ile Cys Cys Asn Pro Ala Cys Thr Gly Cys Tyr | (SEQ ID NO: 148) |
| Cys Cys Glu Lys Cys Cys Asn Pro Ala Cys Thr Gly Cys Tyr | (SEQ ID NO: 149) |
| Cys Cys Glu Met Cys Cys Asn Pro Ala Cys Thr Gly Cys Tyr | (SEQ ID NO: 150) |
| Cys Cys Glu Phe Cys Cys Asn Pro Ala Cys Thr Gly Cys Tyr | (SEQ ID NO: 151) |
| Cys Cys Glu Pro Cys Cys Asn Pro Ala Cys Thr Gly Cys Tyr | (SEQ ID NO: 152 |
| Cys Cys Glu Ser Cys Cys Asn Pro Ala Cys Thr Gly Cys Tyr | (SEQ ID NO: 153) |
| Cys Cys Glu Thr Cys Cys Asn Pro Ala Cys Thr Gly Cys Tyr | (SEQ ID NO: 154) |
| Cys Cys Glu Trp Cys Cys Asn Pro Ala Cys Thr Gly Cys Tyr | (SEQ ID NO: 155) |
| Cys Cys Glu Val Cys Cys Asn Pro Ala Cys Thr Gly Cys Tyr | (SEQ ID NO: 156) |
| Cys Cys Glu Tyr Cys Cys Asn Pro Ala Cys Thr Gly Cys | (SEQ ID NO: 157) |
| Cys Cys Glu Ala Cys Cys Asn Pro Ala Cys Thr Gly Cys | (SEQ ID NO: 158) |
| Cys Cys Glu Arg Cys Cys Asn Pro Ala Cys Thr Gly Cys | (SEQ ID NO: 159) |
| Cys Cys Glu Asn Cys Cys Asn Pro Ala Cys Thr Gly Cys | (SEQ ID NO: 160) |
| Cys Cys Glu Asp Cys Cys Asn Pro Ala Cys Thr Gly Cys | (SEQ ID NO: 161) |
| Cys Cys Glu Cys Cys Cys Asn Pro Ala Cys Thr Gly Cys | (SEQ ID NO: 162) |
| Cys Cys Glu Gln Cys Cys Asn Pro Ala Cys Thr Gly Cys | (SEQ ID NO: 163) |
| Cys Cys Glu Glu Cys Cys Asn Pro Ala Cys Thr Gly Cys | (SEQ ID NO: 164) |
| Cys Cys Glu Gly Cys Cys Asn Pro Ala Cys Thr Gly Cys | (SEQ ID NO: 165) |
| Cys Cys Glu His Cys Cys Asn Pro Ala Cys Thr Gly Cys | (SEQ ID NO: 166) |
| Cys Cys Glu Ile Cys Cys Asn Pro Ala Cys Thr Gly Cys | (SEQ ID NO: 167) |
| Cys Cys Glu Lys Cys Cys Asn Pro Ala Cys Thr Gly Cys | (SEQ ID NO: 168) |
| Cys Cys Glu Met Cys Cys Asn Pro Ala Cys Thr Gly Cys | (SEQ ID NO: 169) |
| Cys Cys Glu Phe Cys Cys Asn Pro Ala Cys Thr Gly Cys | (SEQ ID NO: 170) |
| Cys Cys Glu Pro Cys Cys Asn Pro Ala Cys Thr Gly Cys | (SEQ ID NO: 171) |
| Cys Cys Glu Ser Cys Cys Asn Pro Ala Cys Thr Gly Cys | (SEQ ID NO: 172) |
| Cys Cys Glu Thr Cys Cys Asn Pro Ala Cys Thr Gly Cys; | (SEQ ID NO: 173) |
| Cys Cys Glu Trp Cys Cys Asn Pro Ala Cys Thr Gly Cys | (SEQ ID NO: 174) |
| Cys Cys Glu Val Cys Cys Asn Pro Ala Cys Thr Gly Cys. | (SEQ ID NO: 175) |
| Cys Cys Glu Leu Cys Cys Ala Pro Ala Cys Thr Gly Cys Tyr | (SEQ ID NO: 176) |
| Cys Cys Glu Leu Cys Cys Val Pro Ala Cys Thr Gly Cys Tyr | (SEQ ID NO: 177) |
| Cys Cys Glu Leu Cys Cys Leu Pro Ala Cys Thr Gly Cys Tyr | (SEQ ID NO: 178) |
| Cys Cys Glu Leu Cys Cys Ile Pro Ala Cys Thr Gly Cys Tyr | (SEQ ID NO: 179) |
| Cys Cys Glu Leu Cys Cys Pro Pro Ala Cys Thr Gly Cys Tyr | (SEQ ID NO: 180) |
| Cys Cys Glu Leu Cys Cys Met Pro Ala Cys Thr Gly Cys Tyr | (SEQ ID NO: 181) |
| Cys Cys Glu Leu Cys Cys Phe Pro Ala Cys Thr Gly Cys Tyr | (SEQ ID NO: 182) |
| Cys Cys Glu Leu Cys Cys Trp Pro Ala Cys Thr Gly Cys Tyr | (SEQ ID NO: 183) |
| Cys Cys Glu Leu Cys Cys Gly Pro Ala Cys Thr Gly Cys Tyr | (SEQ ID NO: 184) |
| Cys Cys Glu Leu Cys Cys Ser Pro Ala Cys Thr Gly Cys Tyr | (SEQ ID NO: 185) |
| Cys Cys Glu Leu Cys Cys Thr Pro Ala Cys Thr Gly Cys Tyr | (SEQ ID NO: 186) |
| Cys Cys Glu Leu Cys Cys Cys Pro Ala Cys Thr Gly Cys Tyr | (SEQ ID NO: 187) |
| Cys Cys Glu Leu Cys Cys Gln Pro Ala Cys Thr Gly Cys Tyr | (SEQ ID NO: 188) |
| Cys Cys Glu Leu Cys Cys Tyr Pro Ala Cys Thr Gly Cys Tyr | (SEQ ID NO: 189) |
| Cys Cys Glu Leu Cys Cys Asp Pro Ala Cys Thr Gly Cys Tyr | (SEQ ID NO: 190) |
| Cys Cys Glu Leu Cys Cys Glu Pro Ala Cys Thr Gly Cys Tyr | (SEQ ID NO: 200) |
| Cys Cys Glu Leu Cys Cys Lys Pro Ala Cys Thr Gly Cys Tyr | (SEQ ID NO: 201) |
| Cys Cys Glu Leu Cys Cys Arg Pro Ala Cys Thr Gly Cys Tyr | (SEQ ID NO: 202) |
| Cys Cys Glu Leu Cys Cys His Pro Ala Cys Thr Gly Cys Tyr | (SEQ ID NO: 203) |
| Cys Cys Glu Tyr Cys Cys Ala Pro Ala Cys Thr Gly Cys Tyr | (SEQ ID NO: 204) |
| Cys Cys Glu Tyr Cys Cys Val Pro Ala Cys Thr Gly Cys Tyr | (SEQ ID NO: 205) |
| Cys Cys Glu Tyr Cys Cys Leu Pro Ala Cys Thr Gly Cys Tyr | (SEQ ID NO: 206) |
| Cys Cys Glu Tyr Cys Cys Ile Pro Ala Cys Thr Gly Cys Tyr | (SEQ ID NO: 207) |
| Cys Cys Glu Tyr Cys Cys Pro Pro Ala Cys Thr Gly Cys Tyr | (SEQ ID NO: 208) |
| Cys Cys Glu Tyr Cys Cys Met Pro Ala Cys Thr Gly Cys Tyr | (SEQ ID NO: 209) |
| Cys Cys Glu Tyr Cys Cys Phe Pro Ala Cys Thr Gly Cys Tyr | (SEQ ID NO: 300) |
| Cys Cys Glu Tyr Cys Cys Trp Pro Ala Cys Thr Gly Cys Tyr | (SEQ ID NO: 301) |
| Cys Cys Glu Tyr Cys Cys Gly Pro Ala Cys Thr Gly Cys Tyr | (SEQ ID NO: 302) |
| Cys Cys Glu Tyr Cys Cys Ser Pro Ala Cys Thr Gly Cys Tyr | (SEQ ID NO: 303) |
| Cys Cys Glu Tyr Cys Cys Thr Pro Ala Cys Thr Gly Cys Tyr | (SEQ ID NO: 304) |
| Cys Cys Glu Tyr Cys Cys Cys Pro Ala Cys Thr Gly Cys Tyr | (SEQ ID NO: 305) |
| Cys Cys Glu Tyr Cys Cys Gln Pro Ala Cys Thr Gly Cys Tyr | (SEQ ID NO: 306) |
| Cys Cys Glu Tyr Cys Cys Tyr Pro Ala Cys Thr Gly Cys Tyr | (SEQ ID NO: 307) |
| Cys Cys Glu Tyr Cys Cys Asp Pro Ala Cys Thr Gly Cys Tyr | (SEQ ID NO: 308) |
| Cys Cys Glu Tyr Cys Cys Glu Pro Ala Cys Thr Gly Cys Tyr | (SEQ ID NO: 309) |
| Cys Cys Glu Tyr Cys Cys Lys Pro Ala Cys Thr Gly Cys Tyr | (SEQ ID NO: 310) |
| Cys Cys Glu Tyr Cys Cys Arg Pro Ala Cys Thr Gly Cys Tyr | (SEQ ID NO: 311) |
| Cys Cys Glu Tyr Cys Cys His Pro Ala Cys Thr Gly Cys Tyr | (SEQ ID NO: 312) |
| Cys Cys Glu Leu Cys Cys Ala Pro Ala Cys Thr Gly Cys | (SEQ ID NO: 313) |
| Cys Cys Glu Leu Cys Cys Val Pro Ala Cys Thr Gly Cys | (SEQ ID NO: 314) |
| Cys Cys Glu Leu Cys Cys Leu Pro Ala Cys Thr Gly Cys | (SEQ ID NO: 315) |
| Cys Cys Glu Leu Cys Cys Ile Pro Ala Cys Thr Gly Cys | (SEQ ID NO: 316) |
| Cys Cys Glu Leu Cys Cys Pro Pro Ala Cys Thr Gly Cys | (SEQ ID NO: 317) |
| Cys Cys Glu Leu Cys Cys Met Pro Ala Cys Thr Gly Cys | (SEQ ID NO: 318) |
| Cys Cys Glu Leu Cys Cys Phe Pro Ala Cys Thr Gly Cys | (SEQ ID NO: 319) |
| Cys Cys Glu Leu Cys Cys Trp Pro Ala Cys Thr Gly Cys | (SEQ ID NO: 320) |
| Cys Cys Glu Leu Cys Cys Gly Pro Ala Cys Thr Gly Cys | (SEQ ID NO: 321) |
| Cys Cys Glu Leu Cys Cys Ser Pro Ala Cys Thr Gly Cys | (SEQ ID NO: 322) |
| Cys Cys Glu Leu Cys Cys Thr Pro Ala Cys Thr Gly Cys | (SEQ ID NO: 323) |
| Cys Cys Glu Leu Cys Cys Cys Pro Ala Cys Thr Gly Cys | (SEQ ID NO: 324) |
| Cys Cys Glu Leu Cys Cys Gin Pro Ala Cys Thr Gly Cys | (SEQ ID NO: 325) |
| Cys Cys Glu Leu Cys Cys Tyr Pro Ala Cys Thr Gly Cys | (SEQ ID NO: 326) |
| Cys Cys Glu Leu Cys Cys Asp Pro Ala Cys Thr Gly Cys | (SEQ ID NO: 327) |
| Cys Cys Glu Leu Cys Cys Glu Pro Ala Cys Thr Gly Cys | (SEQ ID NO: 328) |
| Cys Cys Glu Leu Cys Cys Lys Pro Ala Cys Thr Gly Cys | (SEQ ID NO: 329) |
| Cys Cys Glu Leu Cys Cys Arg Pro Ala Cys Thr Gly Cys | (SEQ ID NO: 330) |
| Cys Cys Glu Leu Cys Cys His Pro Ala Cys Thr Gly Cys | (SEQ ID NO: 331) |
| Cys Cys Glu Tyr Cys Cys Ala Pro Ala Cys Thr Gly Cys | (SEQ ID NO: 332) |
| Cys Cys Glu Tyr Cys Cys Val Pro Ala Cys Thr Gly Cys | (SEQ ID NO: 333) |
| Cys Cys Glu Tyr Cys Cys Leu Pro Ala Cys Thr Gly Cys | (SEQ ID NO: 334) |
| Cys Cys Glu Tyr Cys Cys Ile Pro Ala Cys Thr Gly Cys | (SEQ ID NO: 335) |
| Cys Cys Glu Tyr Cys Cys Pro Pro Ala Cys Thr Gly Cys | (SEQ ID NO: 336) |
| Cys Cys Glu Tyr Cys Cys Met Pro Ala Cys Thr Gly Cys | (SEQ ID NO: 337) |
| Cys Cys Glu Tyr Cys Cys Phe Pro Ala Cys Thr Gly Cys | (SEQ ID NO: 338) |
| Cys Cys Glu Tyr Cys Cys Trp Pro Ala Cys Thr Gly Cys | (SEQ ID NO: 339) |
| Cys Cys Glu Tyr Cys Cys Gly Pro Ala Cys Thr Gly Cys | (SEQ ID NO: 340) |
| Cys Cys Glu Tyr Cys Cys Ser Pro Ala Cys Thr Gly Cys | (SEQ ID NO: 341) |
| Cys Cys Glu Tyr Cys Cys Thr Pro Ala Cys Thr Gly Cys | (SEQ ID NO: 342) |
| Cys Cys Glu Tyr Cys Cys Cys Pro Ala Cys Thr Gly Cys | (SEQ ID NO: 343) |
| Cys Cys Glu Tyr Cys Cys Gln Pro Ala Cys Thr Gly Cys | (SEQ ID NO: 344) |
| Cys Cys Glu Tyr Cys Cys Tyr Pro Ala Cys Thr Gly Cys | (SEQ ID NO: 345) |
| Cys Cys Glu Tyr Cys Cys Asp Pro Ala Cys Thr Gly Cys | (SEQ ID NO: 346) |
| Cys Cys Glu Tyr Cys Cys Glu Pro Ala Cys Thr Gly Cys | (SEQ ID NO: 347) |
| Cys Cys Glu Tyr Cys Cys Lys Pro Ala Cys Thr Gly Cys | (SEQ ID NO: 348) |
| Cys Cys Glu Tyr Cys Cys Arg Pro Ala Cys Thr Gly Cys | (SEQ ID NO: 349) |
| Cys Cys Glu Tyr Cys Cys His Pro Ala Cys Thr Gly Cys | (SEQ ID NO: 350) |
| Cys Cys Glu Leu Cys Cys Asn Pro Thr Cys Thr Gly Cys Tyr | (SEQ ID NO: 351) |
| Cys Cys Glu Tyr Cys Cys Asn Pro Thr Cys Thr Gly Cys Tyr | (SEQ ID NO: 352) |
| Cys Cys Glu Leu Cys Cys Asn Pro Thr Cys Thr Gly Cys | (SEQ ID NO: 353) |
| Cys Cys Glu Tyr Cys Cys Asn Pro Thr Cys Thr Gly Cys | (SEQ ID NO: 354) |
| Cys Cys Glu Phe Cys Cys Asn Pro Thr Cys Thr Gly Cys Tyr | (SEQ ID NO: 355) |
| Cys Cys Glu Phe Cys Cys Asn Pro Thr Cys Thr Gly Cys | (SEQ ID NO: 356) |
| Cys Cys Glu Trp Cys Cys Asn Pro Thr Cys Thr Gly Cys Tyr | (SEQ ID NO: 357) |
| Cys Cys Glu Trp Cys Cys Asn Pro Thr Cys Thr Gly Cys | (SEQ ID NO: 358) |
| Cys Cys Glu Leu Cys Cys Asn Gly Ala Cys Thr Gly Cys Tyr | (SEQ ID NO: 359) |
| Cys Cys Glu Tyr Cys Cys Asn Gly Ala Cys Thr Gly Cys Tyr | (SEQ ID NO: 360) |
| Cys Cys Glu Leu Cys Cys Asn Gly Ala Cys Thr Gly Cys | (SEQ ID NO: 361) |
| Cys Cys Glu Tyr Cys Cys Asn Gly Ala Cys Thr Gly Cys | (SEQ ID NO: 362) |
| Cys Cys Glu Phe Cys Cys Asn Gly Ala Cys Thr Gly Cys Tyr | (SEQ ID NO: 363) |
| Cys Cys Glu Phe Cys Cys Asn Gly Ala Cys Thr Gly Cys | (SEQ ID NO: 364) |
| Cys Cys Glu Trp Cys Cys Asn Gly Ala Cys Thr Gly Cys Tyr | (SEQ ID NO: 365) |
| Cys Cys Glu Trp Cys Cys Asn Gly Ala Cys Thr Gly Cys | (SEQ ID NO: 366) |
| Cys Cys Glu Leu Cys Cys Asn Pro Ala Cys Val Gly Cys Tyr | (SEQ ID NO: 367) |
| Cys Cys Glu Tyr Cys Cys Asn Pro Ala Cys Val Gly Cys Tyr | (SEQ ID NO: 368) |
| Cys Cys Glu Leu Cys Cys Asn Pro Ala Cys Val Gly Cys | (SEQ ID NO: 369) |
| Cys Cys Glu Tyr Cys Cys Asn Pro Ala Cys Val Gly Cys | (SEQ ID NO: 370) |
| Cys Cys Glu Phe Cys Cys Asn Pro Ala Cys Val Gly Cys Tyr | (SEQ ID NO: 371) |
| Cys Cys Glu Phe Cys Cys Asn Pro Ala Cys Val Gly Cys | (SEQ ID NO: 372) |
| Cys Cys Glu Trp Cys Cys Asn Pro Ala Cys Val Gly Cys Tyr | (SEQ ID NO: 373) |
| Cys Cys Glu Trp Cys Cys Asn Pro Ala Cys Val Gly Cys | (SEQ ID NO: 374) |
| Cys Cys Glu Leu Cys Cys Asn Pro Ala Cys Gly Gly Cys Tyr | (SEQ ID NO: 375) |
| Cys Cys Glu Tyr Cys Cys Asn Pro Ala Cys Gly Gly Cys Tyr | (SEQ ID NO: 376) |
| Cys Cys Glu Leu Cys Cys Asn Pro Ala Cys Gly Gly Cys | (SEQ ID NO: 377) |
| Cys Cys Glu Tyr Cys Cys Asn Pro Ala Cys Gly Gly Cys | (SEQ ID NO: 378) |
| Cys Cys Glu Phe Cys Cys Asn Pro Ala Cys Gly Gly Cys Tyr | (SEQ ID NO: 379) |
| Cys Cys Glu Phe Cys Cys Asn Pro Ala Cys Gly Gly Cys | (SEQ ID NO: 380) |
| Cys Cys Glu Trp Cys Cys Asn Pro Ala Cys Gly Gly Cys Tyr | (SEQ ID NO: 381) |
| Cys Cys Glu Trp Cys Cys Asn Pro Ala Cys Gly Gly Cys | (SEQ ID NO: 382) |
| Cys Cys Glu Leu Cys Cys Asn Pro Ala Cys Thr Ala Cys Tyr | (SEQ ID NO: 383) |
| Cys Cys Glu Tyr Cys Cys Asn Pro Ala Cys Thr Ala Cys Tyr | (SEQ ID NO: 384) |
| Cys Cys Glu Leu Cys Cys Asn Pro Ala Cys Thr Ala Cys | (SEQ ID NO: 385) |
| Cys Cys Glu Tyr Cys Cys Asn Pro Ala Cys Thr Ala Cys | (SEQ ID NO: 386) |
| Cys Cys Glu Trp Cys Cys Asn Pro Ala Cys Thr Ala Cys Tyr | (SEQ ID NO: 387) |
| Cys Cys Glu Trp Cys Cys Asn Pro Ala Cys Thr Ala Cys | (SEQ ID NO: 388) |
| Cys Cys Glu Phe Cys Cys Asn Pro Ala Cys Thr Ala Cys Tyr | (SEQ ID NO: 389) |
| Cys Cys Glu Phe Cys Cys Asn Pro Ala Cys Thr Ala Cys | (SEQ ID NO: 390) |
| Cys Cys Glu Leu Cys Cys Asn Pro Ala Cys Thr Gly Cys Ala | (SEQ ID NO: 391) |
| Cys Cys Glu Leu Cys Cys Asn Pro Ala Cys Thr Gly Cys Val | (SEQ ID NO: 392) |
| Cys Cys Glu Leu Cys Cys Asn Pro Ala Cys Thr Gly Cys Leu | (SEQ ID NO: 393) |
| Cys Cys Glu Leu Cys Cys Asn Pro Ala Cys Thr Gly Cys Ile | (SEQ ID NO: 394) |
| Cys Cys Glu Leu Cys Cys Asn Pro Ala Cys Thr Gly Cys Pro | (SEQ ID NO: 395) |
| Cys Cys Glu Leu Cys Cys Asn Pro Ala Cys Thr Gly Cys Met | (SEQ ID NO: 396) |
| Cys Cys Glu Leu Cys Cys Asn Pro Ala Cys Thr Gly Cys Phe | (SEQ ID NO: 397) |
| Cys Cys Glu Leu Cys Cys Asn Pro Ala Cys Thr Gly Cys Trp | (SEQ ID NO: 398) |
| Cys Cys Glu Leu Cys Cys Asn Pro Ala Cys Thr Gly Cys Gly | (SEQ ID NO: 399) |
| Cys Cys Glu Leu Cys Cys Asn Pro Ala Cys Thr Gly Cys Ser | (SEQ ID NO: 400) |
| Cys Cys Glu Leu Cys Cys Asn Pro Ala Cys Thr Gly Cys Thr | (SEQ ID NO: 401) |
| Cys Cys Glu Leu Cys Cys Asn Pro Ala Cys Thr Gly Cys Cys | (SEQ ID NO: 402) |
| Cys Cys Glu Leu Cys Cys Asn Pro Ala Cys Thr Gly Cys Asn | (SEQ ID NO: 403) |
| Cys Cys Glu Leu Cys Cys Asn Pro Ala Cys Thr Gly Cys Gln | (SEQ ID NO: 404) |
| Cys Cys Glu Leu Cys Cys Asn Pro Ala Cys Thr Gly Cys Asp | (SEQ ID NO: 405) |
| Cys Cys Glu Leu Cys Cys Asn Pro Ala Cys Thr Gly Cys Glu | (SEQ ID NO: 406) |
| Cys Cys Glu Leu Cys Cys Asn Pro Ala Cys Thr Gly Cys Lys | (SEQ ID NO: 407) |
| Cys Cys Glu Leu Cys Cys Asn Pro Ala Cys Thr Gly Cys Arg | (SEQ ID NO: 408) |
| Cys Cys Glu Leu Cys Cys Asn Pro Ala Cys Thr Gly Cys His | (SEQ ID NO: 409) |
| Cys Cys Glu Tyr Cys Cys Asn Pro Ala Cys Thr Gly Cys Ala | (SEQ ID NO: 410) |
| Cys Cys Glu Tyr Cys Cys Asn Pro Ala Cys Thr Gly Cys Val | (SEQ ID NO: 411) |
| Cys Cys Glu Tyr Cys Cys Asn Pro Ala Cys Thr Gly Cys Leu | (SEQ ID NO: 412) |
| Cys Cys Glu Tyr Cys Cys Asn Pro Ala Cys Thr Gly Cys Ile | (SEQ ID NO: 413) |
| Cys Cys Glu Tyr Cys Cys Asn Pro Ala Cys Thr Gly Cys Pro | (SEQ ID NO: 414) |
| Cys Cys Glu Tyr Cys Cys Asn Pro Ala Cys Thr Gly Cys Met | (SEQ ID NO: 415) |
| Cys Cys Glu Tyr Cys Cys Asn Pro Ala Cys Thr Gly Cys Phe | (SEQ ID NO: 416) |
| Cys Cys Glu Tyr Cys Cys Asn Pro Ala Cys Thr Gly Cys Trp | (SEQ ID NO: 417) |
| Cys Cys Glu Tyr Cys Cys Asn Pro Ala Cys Thr Gly Cys Gly | (SEQ ID NO: 418) |
| Cys Cys Glu Tyr Cys Cys Asn Pro Ala Cys Thr Gly Cys Ser | (SEQ ID NO: 419) |
| Cys Cys Glu Tyr Cys Cys Asn Pro Ala Cys Thr Gly Cys Thr | (SEQ ID NO: 420) |
| Cys Cys Glu Tyr Cys Cys Asn Pro Ala Cys Thr Gly Cys Cys | (SEQ ID NO: 421) |
| Cys Cys Glu Tyr Cys Cys Asn Pro Ala Cys Thr Gly Cys Asn | (SEQ ID NO: 422) |
| Cys Cys Glu Tyr Cys Cys Asn Pro Ala Cys Thr Gly Cys Gln | (SEQ ID NO: 423) |
| Cys Cys Glu Tyr Cys Cys Asn Pro Ala Cys Thr Gly Cys Asp | (SEQ ID NO: 424) |
| Cys Cys Glu Tyr Cys Cys Asn Pro Ala Cys Thr Gly Cys Glu | (SEQ ID NO: 425) |
| Cys Cys Glu Tyr Cys Cys Asn Pro Ala Cys Thr Gly Cys Lys | (SEQ ID NO: 426) |
| Cys Cys Glu Tyr Cys Cys Asn Pro Ala Cys Thr Gly Cys Arg | (SEQ ID NO: 427) |
| Cys Cys Glu Tyr Cys Cys Asn Pro Ala Cys Thr Gly Cys His | (SEQ ID NO: 428) |
| Cys Cys Ala Leu Cys Cys Asn Pro Ala Cys Thr Gly Cys Tyr | (SEQ ID NO: 429) |
| Cys Cys Val Leu Cys Cys Asn Pro Ala Cys Thr Gly Cys Tyr | (SEQ ID NO: 430) |
| Cys Cys Leu Leu Cys Cys Asn Pro Ala Cys Thr Gly Cys Tyr | (SEQ ID NO: 431) |
| Cys Cys Ile Leu Cys Cys Asn Pro Ala Cys Thr Gly Cys Tyr | (SEQ ID NO: 432) |
| Cys Cys Met Leu Cys Cys Asn Pro Ala Cys Thr Gly Cys Tyr | (SEQ ID NO: 433) |
| Cys Cys Phe Leu Cys Cys Asn Pro Ala Cys Thr Gly Cys Tyr | (SEQ ID NO: 434) |
| Cys Cys Trp Leu Cys Cys Asn Pro Ala Cys Thr Gly Cys Tyr | (SEQ ID NO: 435) |
| Cys Cys Gly Leu Cys Cys Asn Pro Ala Cys Thr Gly Cys Tyr | (SEQ ID NO: 436) |
| Cys Cys Ser Leu Cys Cys Asn Pro Ala Cys Thr Gly Cys Tyr | (SEQ ID NO: 437) |
| Cys Cys Thr Leu Cys Cys Asn Pro Ala Cys Thr Gly Cys Tyr | (SEQ ID NO: 438) |
| Cys Cys Cys Leu Cys Cys Asn Pro Ala Cys Thr Gly Cys Tyr | (SEQ ID NO: 439) |
| Cys Cys Asn Leu Cys Cys Asn Pro Ala Cys Thr Gly Cys Tyr | (SEQ ID NO: 440) |
| Cys Cys Gln Leu Cys Cys Asn Pro Ala Cys Thr Gly Cys Tyr | (SEQ ID NO: 441) |
| Cys Cys Tyr Leu Cys Cys Asn Pro Ala Cys Thr Gly Cys Tyr | (SEQ ID NO: 442) |
| Cys Cys Asp Leu Cys Cys Asn Pro Ala Cys Thr Gly Cys Tyr | (SEQ ID NO: 443) |
| Cys Cys Lys Leu Cys Cys Asn Pro Ala Cys Thr Gly Cys Tyr | (SEQ ID NO: 444) |
| Cys Cys Arg Leu Cys Cys Asn Pro Ala Cys Thr Gly Cys Tyr | (SEQ ID NO: 445) |
| Cys Cys His Leu Cys Cys Asn Pro Ala Cys Thr Gly Cys Tyr | (SEQ ID NO: 446) |
| Cys Cys Ala Leu Cys Cys Asn Pro Ala Cys Thr Gly Cys | (SEQ ID NO: 447) |
| Cys Cys Val Leu Cys Cys Asn Pro Ala Cys Thr Gly Cys | (SEQ ID NO: 448) |
| Cys Cys Leu Leu Cys Cys Asn Pro Ala Cys Thr Gly Cys | (SEQ ID NO: 449) |
| Cys Cys Ile Leu Cys Cys Asn Pro Ala Cys Thr Gly Cys | (SEQ ID NO: 450) |
| Cys Cys Met Leu Cys Cys Asn Pro Ala Cys Thr Gly Cys | (SEQ ID NO: 451) |
| Cys Cys Phe Leu Cys Cys Asn Pro Ala Cys Thr Gly Cys | (SEQ ID NO: 452) |
| Cys Cys Trp Leu Cys Cys Asn Pro Ala Cys Thr Gly Cys | (SEQ ID NO: 453) |
| Cys Cys Gly Leu Cys Cys Asn Pro Ala Cys Thr Gly Cys | (SEQ ID NO: 454) |
| Cys Cys Ser Leu Cys Cys Asn Pro Ala Cys Thr Gly Cys | (SEQ ID NO: 455) |
| Cys Cys Thr Leu Cys Cys Asn Pro Ala Cys Thr Gly Cys | (SEQ ID NO: 456) |
| Cys Cys Cys Leu Cys Cys Asn Pro Ala Cys Thr Gly Cys | (SEQ ID NO: 457) |
| Cys Cys Asn Leu Cys Cys Asn Pro Ala Cys Thr Gly Cys | (SEQ ID NO: 458) |
| Cys Cys Gln Leu Cys Cys Asn Pro Ala Cys Thr Gly Cys | (SEQ ID NO: 459) |
| Cys Cys Tyr Leu Cys Cys Asn Pro Ala Cys Thr Gly Cys | (SEQ ID NO: 460) |
| Cys Cys Asp Leu Cys Cys Asn Pro Ala Cys Thr Gly Cys | (SEQ ID NO: 461) |
| Cys Cys Lys Leu Cys Cys Asn Pro Ala Cys Thr Gly Cys | (SEQ ID NO: 462) |
| Cys Cys Arg Leu Cys Cys Asn Pro Ala Cys Thr Gly Cys | (SEQ ID NO: 463) |
| Cys Cys His Leu Cys Cys Asn Pro Ala Cys Thr Gly Cys | (SEQ ID NO: 464) |
| Cys Cys Ala Tyr Cys Cys Asn Pro Ala Cys Thr Gly Cys Tyr | (SEQ ID NO: 465) |
| Cys Cys Val Tyr Cys Cys Asn Pro Ala Cys Thr Gly Cys Tyr | (SEQ ID NO: 466) |
| Cys Cys Leu Tyr Cys Cys Asn Pro Ala Cys Thr Gly Cys Tyr | (SEQ ID NO: 467) |
| Cys Cys Ile Tyr Cys Cys Asn Pro Ala Cys Thr Gly Cys Tyr | (SEQ ID NO: 468) |
| Cys Cys Met Tyr Cys Cys Asn Pro Ala Cys Thr Gly Cys Tyr | (SEQ ID NO: 469) |
| Cys Cys Phe Tyr Cys Cys Asn Pro Ala Cys Thr Gly Cys Tyr | (SEQ ID NO: 470) |
| Cys Cys Trp Tyr Cys Cys Asn Pro Ala Cys Thr Gly Cys Tyr | (SEQ ID NO: 471) |
| Cys Cys Gly Tyr Cys Cys Asn Pro Ala Cys Thr Gly Cys Tyr | (SEQ ID NO: 472) |
| Cys Cys Ser Tyr Cys Cys Asn Pro Ala Cys Thr Gly Cys Tyr | (SEQ ID NO: 473) |
| Cys Cys Thr Tyr Cys Cys Asn Pro Ala Cys Thr Gly Cys Tyr | (SEQ ID NO: 474) |
| Cys Cys Cys Tyr Cys Cys Asn Pro Ala Cys Thr Gly Cys Tyr | (SEQ ID NO: 475) |
| Cys Cys Asn Tyr Cys Cys Asn Pro Ala Cys Thr Gly Cys Tyr | (SEQ ID NO: 476) |
| Cys Cys Gln Tyr Cys Cys Asn Pro Ala Cys Thr Gly Cys Tyr | (SEQ ID NO: 477) |
| Cys Cys Tyr Tyr Cys Cys Asn Pro Ala Cys Thr Gly Cys Tyr | (SEQ ID NO: 478) |
| Cys Cys Asp Tyr Cys Cys Asn Pro Ala Cys Thr Gly Cys Tyr | (SEQ ID NO: 479) |
| Cys Cys Lys Tyr Cys Cys Asn Pro Ala Cys Thr Gly Cys Tyr | (SEQ ID NO: 480) |
| Cys Cys Arg Tyr Cys Cys Asn Pro Ala Cys Thr Gly Cys Tyr | (SEQ ID NO: 481) |
| Cys Cys His Tyr Cys Cys Asn Pro Ala Cys Thr Gly Cys Tyr | (SEQ ID NO: 482) |
| Cys Cys Ala Tyr Cys Cys Asn Pro Ala Cys Thr Gly Cys | (SEQ ID NO: 483) |
| Cys Cys Val Tyr Cys Cys Asn Pro Ala Cys Thr Gly Cys | (SEQ ID NO: 484) |
| Cys Cys Leu Tyr Cys Cys Asn Pro Ala Cys Thr Gly Cys | (SEQ ID NO: 485) |
| Cys Cys Ile Tyr Cys Cys Asn Pro Ala Cys Thr Gly Cys | (SEQ ID NO: 486) |
| Cys Cys Met Tyr Cys Cys Asn Pro Ala Cys Thr Gly Cys | (SEQ ID NO: 487) |
| Cys Cys Phe Tyr Cys Cys Asn Pro Ala Cys Thr Gly Cys | (SEQ ID NO: 488) |
| Cys Cys Trp Tyr Cys Cys Asn Pro Ala Cys Thr Gly Cys | (SEQ ID NO: 489) |
| Cys Cys Gly Tyr Cys Cys Asn Pro Ala Cys Thr Gly Cys | (SEQ ID NO: 490) |
| Cys Cys Ser Tyr Cys Cys Asn Pro Ala Cys Thr Gly Cys | (SEQ ID NO: 491) |
| Cys Cys Thr Tyr Cys Cys Asn Pro Ala Cys Thr Gly Cys | (SEQ ID NO: 492) |
| Cys Cys Cys Tyr Cys Cys Asn Pro Ala Cys Thr Gly Cys | (SEQ ID NO: 493) |
| Cys Cys Asn Tyr Cys Cys Asn Pro Ala Cys Thr Gly Cys | (SEQ ID NO: 494) |
| Cys Cys Gln Tyr Cys Cys Asn Pro Ala Cys Thr Gly Cys | (SEQ ID NO: 495) |
| Cys Cys Tyr Tyr Cys Cys Asn Pro Ala Cys Thr Gly Cys | (SEQ ID NO: 496) |
| Cys Cys Asp Tyr Cys Cys Asn Pro Ala Cys Thr Gly Cys | (SEQ ID NO: 497) |
| Cys Cys Lys Tyr Cys Cys Asn Pro Ala Cys Thr Gly Cys | (SEQ ID NO: 498) |
| Cys Cys Arg Tyr Cys Cys Asn Pro Ala Cys Thr Gly Cys | (SEQ ID NO: 499) |
| Cys Cys His Tyr Cys Cys Asn Pro Ala Cys Thr Gly Cys | (SEQ ID NO: 500) |
| Cys Cys Glu Phe Cys Cys Ala Pro Ala Cys Thr Gly Cys Tyr | (SEQ ID NO: 501) |
| Cys Cys Glu Phe Cys Cys Val Pro Ala Cys Thr Gly Cys Tyr | (SEQ ID NO: 502) |
| Cys Cys Glu Phe Cys Cys Leu Pro Ala Cys Thr Gly Cys Tyr | (SEQ ID NO: 503) |
| Cys Cys Glu Phe Cys Cys Ile Pro Ala Cys Thr Gly Cys Tyr | (SEQ ID NO: 504) |
| Cys Cys Glu Phe Cys Cys Pro Pro Ala Cys Thr Gly Cys Tyr | (SEQ ID NO: 505) |
| Cys Cys Glu Phe Cys Cys Met Pro Ala Cys Thr Gly Cys Tyr | (SEQ ID NO: 506) |
| Cys Cys Glu Phe Cys Cys Phe Pro Ala Cys Thr Gly Cys Tyr | (SEQ ID NO: 507) |
| Cys Cys Glu Phe Cys Cys Trp Pro Ala Cys Thr Gly Cys Tyr | (SEQ ID NO: 508) |
| Cys Cys Glu Phe Cys Cys Gly Pro Ala Cys Thr Gly Cys Tyr | (SEQ ID NO: 509) |
| Cys Cys Glu Phe Cys Cys Ser Pro Ala Cys Thr Gly Cys Tyr | (SEQ ID NO: 510) |
| Cys Cys Glu Phe Cys Cys Thr Pro Ala Cys Thr Gly Cys Tyr | (SEQ ID NO: 511) |
| Cys Cys Glu Phe Cys Cys Cys Pro Ala Cys Thr Gly Cys Tyr | (SEQ ID NO: 512) |
| Cys Cys Glu Phe Cys Cys Gln Pro Ala Cys Thr Gly Cys Tyr | (SEQ ID NO: 513) |
| Cys Cys Glu Phe Cys Cys Tyr Pro Ala Cys Thr Gly Cys Tyr | (SEQ ID NO: 514) |
| Cys Cys Glu Phe Cys Cys Asp Pro Ala Cys Thr Gly Cys Tyr | (SEQ ID NO: 515) |
| Cys Cys Glu Phe Cys Cys Glu Pro Ala Cys Thr Gly Cys Tyr | (SEQ ID NO: 516) |
| Cys Cys Glu Phe Cys Cys Lys Pro Ala Cys Thr Gly Cys Tyr | (SEQ ID NO: 517) |
| Cys Cys Glu Phe Cys Cys Arg Pro Ala Cys Thr Gly Cys Tyr | (SEQ ID NO: 518) |
| Cys Cys Glu Phe Cys Cys His Pro Ala Cys Thr Gly Cys Tyr | (SEQ ID NO: 519) |
| Cys Cys Glu Phe Cys Cys Ala Pro Ala Cys Thr Gly Cys | (SEQ ID NO: 520) |
| Cys Cys Glu Phe Cys Cys Val Pro Ala Cys Thr Gly Cys | (SEQ ID NO: 521) |
| Cys Cys Glu Phe Cys Cys Leu Pro Ala Cys Thr Gly Cys | (SEQ ID NO: 522) |
| Cys Cys Glu Phe Cys Cys Ile Pro Ala Cys Thr Gly Cys | (SEQ ID NO: 523) |
| Cys Cys Glu Phe Cys Cys Pro Pro Ala Cys Thr Gly Cys | (SEQ ID NO: 524) |
| Cys Cys Glu Phe Cys Cys Met Pro Ala Cys Thr Gly Cys | (SEQ ID NO: 525) |
| Cys Cys Glu Phe Cys Cys Phe Pro Ala Cys Thr Gly Cys | (SEQ ID NO: 526) |
| Cys Cys Glu Phe Cys Cys Trp Pro Ala Cys Thr Gly Cys | (SEQ ID NO: 527) |
| Cys Cys Glu Phe Cys Cys Gly Pro Ala Cys Thr Gly Cys | (SEQ ID NO: 528) |
| Cys Cys Glu Phe Cys Cys Ser Pro Ala Cys Thr Gly Cys | (SEQ ID NO: 529) |
| Cys Cys Glu Phe Cys Cys Thr Pro Ala Cys Thr Gly Cys | (SEQ ID NO: 530) |
| Cys Cys Glu Phe Cys Cys Cys Pro Ala Cys Thr Gly Cys | (SEQ ID NO: 531) |
| Cys Cys Glu Phe Cys Cys Gln Pro Ala Cys Thr Gly Cys | (SEQ ID NO: 532) |
| Cys Cys Glu Phe Cys Cys Tyr Pro Ala Cys Thr Gly Cys | (SEQ ID NO: 533) |
| Cys Cys Glu Phe Cys Cys Asp Pro Ala Cys Thr Gly Cys | (SEQ ID NO: 534) |
| Cys Cys Glu Phe Cys Cys Glu Pro Ala Cys Thr Gly Cys | (SEQ ID NO: 535) |
| Cys Cys Glu Phe Cys Cys Lys Pro Ala Cys Thr Gly Cys | (SEQ ID NO: 536) |
| Cys Cys Glu Phe Cys Cys Arg Pro Ala Cys Thr Gly Cys | (SEQ ID NO: 537) |
| Cys Cys Glu Phe Cys Cys His Pro Ala Cys Thr Gly Cys | (SEQ ID NO: 538) |
| Cys Cys Glu Trp Cys Cys Ala Pro Ala Cys Thr Gly Cys Tyr | (SEQ ID NO: 539) |
| Cys Cys Glu Trp Cys Cys Val Pro Ala Cys Thr Gly Cys Tyr | (SEQ ID NO: 540) |
| Cys Cys Glu Trp Cys Cys Leu Pro Ala Cys Thr Gly Cys Tyr | (SEQ ID NO: 541) |
| Cys Cys Glu Trp Cys Cys Ile Pro Ala Cys Thr Gly Cys Tyr | (SEQ ID NO: 542) |
| Cys Cys Glu Trp Cys Cys Pro Pro Ala Cys Thr Gly Cys Tyr | (SEQ ID NO: 543) |
| Cys Cys Glu Trp Cys Cys Met Pro Ala Cys Thr Gly Cys Tyr | (SEQ ID NO: 544) |
| Cys Cys Glu Trp Cys Cys Phe Pro Ala Cys Thr Gly Cys Tyr | (SEQ ID NO: 545) |
| Cys Cys Glu Trp Cys Cys Trp Pro Ala Cys Thr Gly Cys Tyr | (SEQ ID NO: 546) |
| Cys Cys Glu Trp Cys Cys Gly Pro Ala Cys Thr Gly Cys Tyr | (SEQ ID NO: 547) |
| Cys Cys Glu Trp Cys Cys Ser Pro Ala Cys Thr Gly Cys Tyr | (SEQ ID NO: 548) |
| Cys Cys Glu Trp Cys Cys Thr Pro Ala Cys Thr Gly Cys Tyr | (SEQ ID NO: 549) |
| Cys Cys Glu Trp Cys Cys Cys Pro Ala Cys Thr Gly Cys Tyr | (SEQ ID NO: 550) |
| Cys Cys Glu Trp Cys Cys Gin Pro Ala Cys Thr Gly Cys Tyr | (SEQ ID NO: 551) |
| Cys Cys Glu Trp Cys Cys Tyr Pro Ala Cys Thr Gly Cys Tyr | (SEQ ID NO: 552) |
| Cys Cys Glu Trp Cys Cys Asp Pro Ala Cys Thr Gly Cys Tyr | (SEQ ID NO: 553) |
| Cys Cys Glu Trp Cys Cys Glu Pro Ala Cys Thr Gly Cys Tyr | (SEQ ID NO: 554) |
| Cys Cys Glu Trp Cys Cys Lys Pro Ala Cys Thr Gly Cys Tyr | (SEQ ID NO: 555) |
| Cys Cys Glu Trp Cys Cys Arg Pro Ala Cys Thr Gly Cys Tyr | (SEQ ID NO: 556) |
| Cys Cys Glu Trp Cys Cys His Pro Ala Cys Thr Gly Cys Tyr | (SEQ ID NO: 557) |
| Cys Cys Glu Trp Cys Cys Ala Pro Ala Cys Thr Gly Cys | (SEQ ID NO: 558) |
| Cys Cys Glu Trp Cys Cys Val Pro Ala Cys Thr Gly Cys | (SEQ ID NO: 559) |
| Cys Cys Glu Trp Cys Cys Leu Pro Ala Cys Thr Gly Cys | (SEQ ID NO: 560) |
| Cys Cys Glu Trp Cys Cys Ile Pro Ala Cys Thr Gly Cys | (SEQ ID NO: 561) |
| Cys Cys Glu Trp Cys Cys Pro Pro Ala Cys Thr Gly Cys | (SEQ ID NO: 562) |
| Cys Cys Glu Trp Cys Cys Met Pro Ala Cys Thr Gly Cys | (SEQ ID NO: 563) |
| Cys Cys Glu Trp Cys Cys Phe Pro Ala Cys Thr Gly Cys | (SEQ ID NO: 564) |
| Cys Cys Glu Trp Cys Cys Trp Pro Ala Cys Thr Gly Cys | (SEQ ID NO: 565) |
| Cys Cys Glu Trp Cys Cys Gly Pro Ala Cys Thr Gly Cys | (SEQ ID NO: 566) |
| Cys Cys Glu Trp Cys Cys Ser Pro Ala Cys Thr Gly Cys | (SEQ ID NO: 567) |
| Cys Cys Glu Trp Cys Cys Thr Pro Ala Cys Thr Gly Cys | (SEQ ID NO: 568) |
| Cys Cys Glu Trp Cys Cys Cys Pro Ala Cys Thr Gly Cys | (SEQ ID NO: 569) |
| Cys Cys Glu Trp Cys Cys Gln Pro Ala Cys Thr Gly Cys | (SEQ ID NO: 570) |
| Cys Cys Glu Trp Cys Cys Tyr Pro Ala Cys Thr Gly Cys | (SEQ ID NO: 571) |
| Cys Cys Glu Trp Cys Cys Asp Pro Ala Cys Thr Gly Cys | (SEQ ID NO: 572) |
| Cys Cys Glu Trp Cys Cys Glu Pro Ala Cys Thr Gly Cys | (SEQ ID NO: 573) |
| Cys Cys Glu Trp Cys Cys Lys Pro Ala Cys Thr Gly Cys | (SEQ ID NO: 574) |
| Cys Cys Glu Trp Cys Cys Arg Pro Ala Cys Thr Gly Cys | (SEQ ID NO: 575) |
| Cys Cys Glu Trp Cys Cys His Pro Ala Cys Thr Gly Cys | (SEQ ID NO: 576) |
| Cys Cys Glu Trp Cys Cys Asn Pro Ala Cys Thr Gly Cys Ala | (SEQ ID NO: 577) |
| Cys Cys Glu Trp Cys Cys Asn Pro Ala Cys Thr Gly Cys Val | (SEQ ID NO: 578) |
| Cys Cys Glu Trp Cys Cys Asn Pro Ala Cys Thr Gly Cys Leu | (SEQ ID NO: 579) |
| Cys Cys Glu Trp Cys Cys Asn Pro Ala Cys Thr Gly Cys Ile | (SEQ ID NO: 580) |
| Cys Cys Glu Trp Cys Cys Asn Pro Ala Cys Thr Gly Cys Pro | (SEQ ID NO: 581 |
| Cys Cys Glu Trp Cys Cys Asn Pro Ala Cys Thr Gly Cys Met | (SEQ ID NO: 58)2 |
| Cys Cys Glu Trp Cys Cys Asn Pro Ala Cys Thr Gly Cys Phe | (SEQ ID NO: 583) |
| Cys Cys Glu Trp Cys Cys Asn Pro Ala Cys Thr Gly Cys Trp | (SEQ ID NO: 584) |
| Cys Cys Glu Trp Cys Cys Asn Pro Ala Cys Thr Gly Cys Gly | (SEQ ID NO: 585) |
| Cys Cys Glu Trp Cys Cys Asn Pro Ala Cys Thr Gly Cys Ser | (SEQ ID NO: 586) |
| Cys Cys Glu Trp Cys Cys Asn Pro Ala Cys Thr Gly Cys Thr | (SEQ ID NO: 587) |
| Cys Cys Glu Trp Cys Cys Asn Pro Ala Cys Thr Gly Cys Cys | (SEQ ID NO: 588) |
| Cys Cys Glu Trp Cys Cys Asn Pro Ala Cys Thr Gly Cys Asn | (SEQ ID NO: 589) |
| Cys Cys Glu Trp Cys Cys Asn Pro Ala Cys Thr Gly Cys Gln | (SEQ ID NO: 590) |
| Cys Cys Glu Trp Cys Cys Asn Pro Ala Cys Thr Gly Cys Asp | (SEQ ID NO: 591) |
| Cys Cys Glu Trp Cys Cys Asn Pro Ala Cys Thr Gly Cys Glu | (SEQ ID NO: 592) |
| Cys Cys Glu Trp Cys Cys Asn Pro Ala Cys Thr Gly Cys Lys | (SEQ ID NO: 593) |
| Cys Cys Glu Trp Cys Cys Asn Pro Ala Cys Thr Gly Cys Arg | (SEQ ID NO: 594) |
| Cys Cys Glu Trp Cys Cys Asn Pro Ala Cys Thr Gly Cys His | (SEQ ID NO: 595) |
| Cys Cys Glu Phe Cys Cys Asn Pro Ala Cys Thr Gly Cys Ala | (SEQ ID NO: 596) |
| Cys Cys Glu Phe Cys Cys Asn Pro Ala Cys Thr Gly Cys Val | (SEQ ID NO: 597) |
| Cys Cys Glu Phe Cys Cys Asn Pro Ala Cys Thr Gly Cys Leu | (SEQ ID NO: 598) |
| Cys Cys Glu Phe Cys Cys Asn Pro Ala Cys Thr Gly Cys Ile | (SEQ ID NO: 599) |
| Cys Cys Glu Phe Cys Cys Asn Pro Ala Cys Thr Gly Cys Pro | (SEQ ID NO: 600) |
| Cys Cys Glu Phe Cys Cys Asn Pro Ala Cys Thr Gly Cys Met | (SEQ ID NO: 601) |
| Cys Cys Glu Phe Cys Cys Asn Pro Ala Cys Thr Gly Cys Phe | (SEQ ID NO: 602) |
| Cys Cys Glu Phe Cys Cys Asn Pro Ala Cys Thr Gly Cys Trp | (SEQ ID NO: 603) |
| Cys Cys Glu Phe Cys Cys Asn Pro Ala Cys Thr Gly Cys Gly | (SEQ ID NO: 604) |
| Cys Cys Glu Phe Cys Cys Asn Pro Ala Cys Thr Gly Cys Ser | (SEQ ID NO: 605) |
| Cys Cys Glu Phe Cys Cys Asn Pro Ala Cys Thr Gly Cys Thr | (SEQ ID NO: 606) |
| Cys Cys Glu Phe Cys Cys Asn Pro Ala Cys Thr Gly Cys Cys | (SEQ ID NO: 607) |
| Cys Cys Glu Phe Cys Cys Asn Pro Ala Cys Thr Gly Cys Asn | (SEQ ID NO: 608) |
| Cys Cys Glu Phe Cys Cys Asn Pro Ala Cys Thr Gly Cys Gln | (SEQ ID NO: 609) |
| Cys Cys Glu Phe Cys Cys Asn Pro Ala Cys Thr Gly Cys Asp | (SEQ ID NO: 610) |
| Cys Cys Glu Phe Cys Cys Asn Pro Ala Cys Thr Gly Cys Glu | (SEQ ID NO: 611) |
| Cys Cys Glu Phe Cys Cys Asn Pro Ala Cys Thr Gly Cys Lys | (SEQ ID NO: 612) |
| Cys Cys Glu Phe Cys Cys Asn Pro Ala Cys Thr Gly Cys Arg | (SEQ ID NO: 613) |
| Cys Cys Glu Phe Cys Cys Asn Pro Ala Cys Thr Gly Cys His | (SEQ ID NO: 614) |
| Cys Cys Ala Phe Cys Cys Asn Pro Ala Cys Thr Gly Cys Tyr | (SEQ ID NO: 615) |
| Cys Cys Val Phe Cys Cys Asn Pro Ala Cys Thr Gly Cys Tyr | (SEQ ID NO: 616) |
| Cys Cys Leu Phe Cys Cys Asn Pro Ala Cys Thr Gly Cys Tyr | (SEQ ID NO: 617) |
| Cys Cys Ile Phe Cys Cys Asn Pro Ala Cys Thr Gly Cys Tyr | (SEQ ID NO: 618) |
| Cys Cys Met Phe Cys Cys Asn Pro Ala Cys Thr Gly Cys Tyr | (SEQ ID NO: 619) |
| Cys Cys Phe Phe Cys Cys Asn Pro Ala Cys Thr Gly Cys Tyr | (SEQ ID NO: 620) |
| Cys Cys Trp Phe Cys Cys Asn Pro Ala Cys Thr Gly Cys Tyr | (SEQ ID NO: 621) |
| Cys Cys Gly Phe Cys Cys Asn Pro Ala Cys Thr Gly Cys Tyr | (SEQ ID NO: 622) |
| Cys Cys Ser Phe Cys Cys Asn Pro Ala Cys Thr Gly Cys Tyr | (SEQ ID NO: 623) |
| Cys Cys Thr Phe Cys Cys Asn Pro Ala Cys Thr Gly Cys Tyr | (SEQ ID NO: 624) |
| Cys Cys Cys Phe Cys Cys Asn Pro Ala Cys Thr Gly Cys Tyr | (SEQ ID NO: 625) |
| Cys Cys Asn Phe Cys Cys Asn Pro Ala Cys Thr Gly Cys Tyr | (SEQ ID NO: 626) |
| Cys Cys Gln Phe Cys Cys Asn Pro Ala Cys Thr Gly Cys Tyr | (SEQ ID NO: 627) |
| Cys Cys Tyr Phe Cys Cys Asn Pro Ala Cys Thr Gly Cys Tyr | (SEQ ID NO: 628) |
| Cys Cys Asp Phe Cys Cys Asn Pro Ala Cys Thr Gly Cys Tyr | (SEQ ID NO: 629) |
| Cys Cys Lys Phe Cys Cys Asn Pro Ala Cys Thr Gly Cys Tyr | (SEQ ID NO: 630) |
| Cys Cys Arg Phe Cys Cys Asn Pro Ala Cys Thr Gly Cys Tyr | (SEQ ID NO: 631) |
| Cys Cys His Phe Cys Cys Asn Pro Ala Cys Thr Gly Cys Tyr | (SEQ ID NO: 632) |
| Cys Cys Ala Phe Cys Cys Asn Pro Ala Cys Thr Gly Cys | (SEQ ID NO: 633) |
| Cys Cys Val Phe Cys Cys Asn Pro Ala Cys Thr Gly Cys | (SEQ ID NO: 634) |
| Cys Cys Leu Phe Cys Cys Asn Pro Ala Cys Thr Gly Cys | (SEQ ID NO: 635) |
| Cys Cys Ile Phe Cys Cys Asn Pro Ala Cys Thr Gly Cys | (SEQ ID NO: 636) |
| Cys Cys Met Phe Cys Cys Asn Pro Ala Cys Thr Gly Cys | (SEQ ID NO: 637) |
| Cys Cys Phe Phe Cys Cys Asn Pro Ala Cys Thr Gly Cys | (SEQ ID NO: 638) |
| Cys Cys Trp Phe Cys Cys Asn Pro Ala Cys Thr Gly Cys | (SEQ ID NO: 639) |
| Cys Cys Gly Phe Cys Cys Asn Pro Ala Cys Thr Gly Cys | (SEQ ID NO: 640) |
| Cys Cys Ser Phe Cys Cys Asn Pro Ala Cys Thr Gly Cys | (SEQ ID NO: 641) |
| Cys Cys Thr Phe Cys Cys Asn Pro Ala Cys Thr Gly Cys | (SEQ ID NO: 642) |
| Cys Cys Cys Phe Cys Cys Asn Pro Ala Cys Thr Gly Cys | (SEQ ID NO: 643) |
| Cys Cys Asn Phe Cys Cys Asn Pro Ala Cys Thr Gly Cys | (SEQ ID NO: 644) |
| Cys Cys Gln Phe Cys Cys Asn Pro Ala Cys Thr Gly Cys | (SEQ ID NO: 645) |
| Cys Cys Tyr Phe Cys Cys Asn Pro Ala Cys Thr Gly Cys | (SEQ ID NO: 646) |
| Cys Cys Asp Phe Cys Cys Asn Pro Ala Cys Thr Gly Cys | (SEQ ID NO: 647) |
| Cys Cys Lys Phe Cys Cys Asn Pro Ala Cys Thr Gly Cys | (SEQ ID NO: 648) |
| Cys Cys Arg Phe Cys Cys Asn Pro Ala Cys Thr Gly Cys | (SEQ ID NO: 649) |
| Cys Cys His Phe Cys Cys Asn Pro Ala Cys Thr Gly Cys | (SEQ ID NO: 650) |
| Cys Cys Ala Trp Cys Cys Asn Pro Ala Cys Thr Gly Cys Tyr | (SEQ ID NO: 651) |
| Cys Cys Val Trp Cys Cys Asn Pro Ala Cys Thr Gly Cys Tyr | (SEQ ID NO: 652) |
| Cys Cys Leu Trp Cys Cys Asn Pro Ala Cys Thr Gly Cys Tyr | (SEQ ID NO: 653) |
| Cys Cys Ile Trp Cys Cys Asn Pro Ala Cys Thr Gly Cys Tyr | (SEQ ID NO: 654) |
| Cys Cys Met Trp Cys Cys Asn Pro Ala Cys Thr Gly Cys Tyr | (SEQ ID NO: 655) |
| Cys Cys Phe Trp Cys Cys Asn Pro Ala Cys Thr Gly Cys Tyr | (SEQ ID NO: 656) |
| Cys Cys Trp Trp Cys Cys Asn Pro Ala Cys Thr Gly Cys Tyr | (SEQ ID NO: 657) |
| Cys Cys Gly Trp Cys Cys Asn Pro Ala Cys Thr Gly Cys Tyr | (SEQ ID NO: 658) |
| Cys Cys Ser Trp Cys Cys Asn Pro Ala Cys Thr Gly Cys Tyr | (SEQ ID NO: 659) |
| Cys Cys Thr Trp Cys Cys Asn Pro Ala Cys Thr Gly Cys Tyr | (SEQ ID NO: 660) |
| Cys Cys Cys Trp Cys Cys Asn Pro Ala Cys Thr Gly Cys Tyr | (SEQ ID NO: 661) |
| Cys Cys Asn Trp Cys Cys Asn Pro Ala Cys Thr Gly Cys Tyr | (SEQ ID NO: 662) |
| Cys Cys Gln Trp Cys Cys Asn Pro Ala Cys Thr Gly Cys Tyr | (SEQ ID NO: 663) |
| Cys Cys Tyr Trp Cys Cys Asn Pro Ala Cys Thr Gly Cys Tyr | (SEQ ID NO: 664) |
| Cys Cys Asp Trp Cys Cys Asn Pro Ala Cys Thr Gly Cys Tyr | (SEQ ID NO: 665) |
| Cys Cys Lys Trp Cys Cys Asn Pro Ala Cys Thr Gly Cys Tyr | (SEQ ID NO: 666) |
| Cys Cys Arg Trp Cys Cys Asn Pro Ala Cys Thr Gly Cys Tyr | (SEQ ID NO: 667) |
| Cys Cys His Trp Cys Cys Asn Pro Ala Cys Thr Gly Cys Tyr | (SEQ ID NO: 668) |
| Cys Cys Ala Trp Cys Cys Asn Pro Ala Cys Thr Gly Cys | (SEQ ID NO: 669) |
| Cys Cys Val Trp Cys Cys Asn Pro Ala Cys Thr Gly Cys | (SEQ ID NO: 670) |
| Cys Cys Leu Trp Cys Cys Asn Pro Ala Cys Thr Gly Cys | (SEQ ID NO: 671) |
| Cys Cys Ile Trp Cys Cys Asn Pro Ala Cys Thr Gly Cys | (SEQ ID NO: 672) |
| Cys Cys Met Trp Cys Cys Asn Pro Ala Cys Thr Gly Cys | (SEQ ID NO: 673) |
| Cys Cys Phe Trp Cys Cys Asn Pro Ala Cys Thr Gly Cys | (SEQ ID NO: 674) |
| Cys Cys Trp Trp Cys Cys Asn Pro Ala Cys Thr Gly Cys | (SEQ ID NO: 675) |
| Cys Cys Gly Trp Cys Cys Asn Pro Ala Cys Thr Gly Cys | (SEQ ID NO: 676) |
| Cys Cys Ser Trp Cys Cys Asn Pro Ala Cys Thr Gly Cys | (SEQ ID NO: 677) |
| Cys Cys Thr Trp Cys Cys Asn Pro Ala Cys Thr Gly Cys | (SEQ ID NO: 678) |
| Cys Cys Cys Trp Cys Cys Asn Pro Ala Cys Thr Gly Cys | (SEQ ID NO: 679) |
| Cys Cys Asn Trp Cys Cys Asn Pro Ala Cys Thr Gly Cys | (SEQ ID NO: 680) |
| Cys Cys Gln Trp Cys Cys Asn Pro Ala Cys Thr Gly Cys | (SEQ ID NO: 681) |
| Cys Cys Tyr Trp Cys Cys Asn Pro Ala Cys Thr Gly Cys | (SEQ ID NO: 682) |
| Cys Cys Asp Trp Cys Cys Asn Pro Ala Cys Thr Gly Cys | (SEQ ID NO: 683) |
| Cys Cys Lys Trp Cys Cys Asn Pro Ala Cys Thr Gly Cys | (SEQ ID NO: 684) |
| Cys Cys Arg Trp Cys Cys Asn Pro Ala Cys Thr Gly Cys | (SEQ ID NO: 685) |
| Cys Cys His Trp Cys Cys Asn Pro Ala Cys Thr Gly Cys | (SEQ ID NO: 686) |
| Cys Glu Leu Cys Ile Asn Val Ala Cys Thr Gly Cys | (SEQ ID NO: 687) |
| Cys Glu Leu Cys Val Asn Val Ala Cys Thr Gly Cys | (SEQ ID NO: 688) |
| Cys Ala Glu Leu Cys Cys Asn Pro Ala Cys | (SEQ ID NO: 689) |
| Cys Cys Gly Leu Cys Cys Asn Pro Ala Cys Ala Gly Cys | (SEQ ID NO: 690) |
| Cys Cys Gly Leu Cys Cys Tyr Pro Ala Cys Ala Gly Cys | (SEQ ID NO: 691) |
| Cys Glu Leu Cys Cys Asn Pro Ala Cys Ala Gly Cys | (SEQ ID NO: 692) |
| Cys Cys Asp Val Cys Cys Tyr Pro Ala Cys Thr Gly Cys | (SEQ ID NO: 693) |
| Cys Cys Glu Leu Cys Cys Asn Pro Ala Cys Ala Gly Cys | (SEQ ID NO: 694) |
| Cys Cys Glu Leu Cys Cys Tyr Pro Ala Cys Ala Gly Cys | (SEQ ID NO: 695) |
| Cys Cys Glu Leu Cys Cys Asn Pro Ala Cys Thr Gly Cys | (SEQ ID NO: 696) |
| Cys Cys Glu Leu Cys Cys Tyr Pro Ala Cys Thr Gly Cys | (SEQ ID NO: 697) |
| Cys Cys Glu Leu Cys Cys Asn Pro Gly Cys Thr Gly Cys | (SEQ ID NO: 698) |
| Cys Cys Glu Ala Cys Cys Asn Pro Ala Cys Thr Gly Cys | (SEQ ID NO: 699) |
| Cys Cys Glu Lys Cys Cys Asn Pro Ala Cys Thr Gly Cys | (SEQ ID NO: 700) |
| Cys Cys Glu Leu Cys Cys Asn Pro Ala Cys Thr Ala Cys | (SEQ ID NO: 701) |
| Cys Cys Pro Leu Cys Cys Asn Pro Ala Cys Thr Gly Cys | (SEQ ID NO: 702) |
| Ala Cys Glu Leu Cys Ala Asn Pro Ala Cys Thr Gly Cys | (SEQ ID NO: 703) |
| Cys Cys Glu Leu Ala Cys Asn Pro Ala Cys Thr Gly Ala | (SEQ ID NO: 704) |
| Cys Glu Leu Cys Ala Asn Pro Ala Cys Thr Gly Cys | (SEQ ID NO: 705) |
| Cys Cys Glu Leu Ala Cys Asn Pro Ala Cys | (SEQ ID NO: 706) |
| Cys Cys Asp Val Cys Cys Asn Pro Ala Cys Ala Gly Cys | (SEQ ID NO: 707) |
| Cys Cys Asp Val Cys Cys Asn Pro Ala Cys Thr Gly Cys | (SEQ ID NO: 708) |
| Cys Cys Asp Val Cys Cys Asn Pro Ala Cys Ala Gly Cys Tyr | (SEQ ID NO: 709) |
| Cys Cys Asp Val Cys Cys Asn Pro Ala Cys Thr Gly Cys Tyr | (SEQ ID NO: 710) |
| Cys Cys Glu Leu Cys Cys Tyr Pro Ala Cys Ala Gly Cys | (SEQ ID NO: 711) |
| Cys Cys Ile Cys Cys Asn Pro Ala Cys Phe Gly Cys | (SEQ ID NO: 712) |
| Cys Cys Asn Tyr Cys Cys Ser Pro Cys Gly Cys | (SEQ ID NO: 713) |
| Cys Cys Asp Val Cys Cys Asn Pro Ala Cys Ala Gly Cys | (SEQ ID NO. 714) |
| Cys Cys Asp Ala Cys Cys Asn Pro Ala Cys Ala Gly Cys | (SEQ ID NO. 715) |
| Cys Cys Asp Cys Cys Cys Asn Pro Ala Cys Ala Gly Cys | (SEQ ID NO. 716) |
| Cys Cys Asp Asp Cys Cys Asn Pro Ala Cys Ala Gly Cys | (SEQ ID NO. 717) |
| Cys Cys Asp Glu Cys Cys Asn Pro Ala Cys Ala Gly Cys | (SEQ ID NO. 718) |
| Cys Cys Asp Phe Cys Cys Asn Pro Ala Cys Ala Gly Cys | (SEQ ID NO. 719) |
| Cys Cys Asp Gly Cys Cys Asn Pro Ala Cys Ala Gly Cys | (SEQ ID NO. 720) |
| Cys Cys Asp His Cys Cys Asn Pro Ala Cys Ala Gly Cys | (SEQ ID NO. 721) |
| Cys Cys Asp Ile Cys Cys Asn Pro Ala Cys Ala Gly Cys | (SEQ ID NO. 722) |
| Cys Cys Asp Lys Cys Cys Asn Pro Ala Cys Ala Gly Cys | (SEQ ID NO. 723) |
| Cys Cys Asp Leu Cys Cys Asn Pro Ala Cys Ala Gly Cys | (SEQ ID NO. 724) |
| Cys Cys Asp Met Cys Cys Asn Pro Ala Cys Ala Gly Cys | (SEQ ID NO. 725) |
| Cys Cys Asp Asn Cys Cys Asn Pro Ala Cys Ala Gly Cys | (SEQ ID NO. 726) |
| Cys Cys Asp Pro Cys Cys Asn Pro Ala Cys Ala Gly Cys | (SEQ ID NO. 727) |
| Cys Cys Asp Gln Cys Cys Asn Pro Ala Cys Ala Gly Cys | (SEQ ID NO. 728) |
| Cys Cys Asp Arg Cys Cys Asn Pro Ala Cys Ala Gly Cys | (SEQ ID NO. 729) |
| Cys Cys Asp Ser Cys Cys Asn Pro Ala Cys Ala Gly Cys | (SEQ ID NO. 730) |
| Cys Cys Asp Thr Cys Cys Asn Pro Ala Cys Ala Gly Cys | (SEQ ID NO. 731) |
| Cys Cys Asp Trp Cys Cys Asn Pro Ala Cys Ala Gly Cys | (SEQ ID NO. 732) |
| Cys Cys Asp Tyr Cys Cys Asn Pro Ala Cys Ala Gly Cys | (SEQ ID NO. 733) |
| Cys Cys Glu Ile Cys Cys Asn Pro Ala Cys Phe Gly Cys | (SEQ ID NO. 734) |
| Cys Cys Glu Ala Cys Cys Asn Pro Ala Cys Phe Gly Cys | (SEQ ID NO. 735) |
| Cys Cys Glu Cys Cys Cys Asn Pro Ala Cys Phe Gly Cys | (SEQ ID NO. 736) |
| Cys Cys Glu Asp Cys Cys Asn Pro Ala Cys Phe Gly Cys | (SEQ ID NO. 737) |
| Cys Cys Glu Glu Cys Cys Asn Pro Ala Cys Phe Gly Cys | (SEQ ID NO. 738) |
| Cys Cys Glu Phe Cys Cys Asn Pro Ala Cys Phe Gly Cys | (SEQ ID NO. 739) |
| Cys Cys Glu Gly Cys Cys Asn Pro Ala Cys Phe Gly Cys | (SEQ ID NO. 740) |
| Cys Cys Glu His Cys Cys Asn Pro Ala Cys Phe Gly Cys | (SEQ ID NO. 741) |
| Cys Cys Glu Lys Cys Cys Asn Pro Ala Cys Phe Gly Cys | (SEQ ID NO. 742) |
| Cys Cys Glu Leu Cys Cys Asn Pro Ala Cys Phe Gly Cys | (SEQ ID NO. 743) |
| Cys Cys Glu Met Cys Cys Asn Pro Ala Cys Phe Gly Cys | (SEQ ID NO. 744) |
| Cys Cys Glu Asn Cys Cys Asn Pro Ala Cys Phe Gly Cys | (SEQ ID NO. 745) |
| Cys Cys Glu Pro Cys Cys Asn Pro Ala Cys Phe Gly Cys | (SEQ ID NO. 746) |
| Cys Cys Glu Gln Cys Cys Asn Pro Ala Cys Phe Gly Cys | (SEQ ID NO. 747) |
| Cys Cys Glu Arg Cys Cys Asn Pro Ala Cys Phe Gly Cys | (SEQ ID NO. 748) |
| Cys Cys Glu Ser Cys Cys Asn Pro Ala Cys Phe Gly Cys | (SEQ ID NO. 749) |
| Cys Cys Glu Thr Cys Cys Asn Pro Ala Cys Phe Gly Cys | (SEQ ID NO. 750) |
| Cys Cys Glu Val Cys Cys Asn Pro Ala Cys Phe Gly Cys | (SEQ ID NO. 751) |
| Cys Cys Glu Trp Cys Cys Asn Pro Ala Cys Phe Gly Cys | (SEQ ID NO. 752) |
| Cys Cys Glu Tyr Cys Cys Asn Pro Ala Cys Phe Gly Cys | (SEQ ID NO. 753) |
| Cys Cys Glu Leu Cys Cys Asn Pro Ala Cys Ala Pro Cys | (SEQ ID NO. 754) |
| Cys Cys Glu Ala Cys Cys Asn Pro Ala Cys Ala Pro Cys | (SEQ ID NO. 755) |
| Cys Cys Glu Cys Cys Cys Asn Pro Ala Cys Ala Pro Cys | (SEQ ID NO. 756) |
| Cys Cys Glu Asp Cys Cys Asn Pro Ala Cys Ala Pro Cys | (SEQ ID NO. 757) |
| Cys Cys Glu Glu Cys Cys Asn Pro Ala Cys Ala Pro Cys | (SEQ ID NO. 758) |
| Cys Cys Glu Phe Cys Cys Asn Pro Ala Cys Ala Pro Cys | (SEQ ID NO. 759) |
| Cys Cys Glu Gly Cys Cys Asn Pro Ala Cys Ala Pro Cys | (SEQ ID NO. 760) |
| Cys Cys Glu His Cys Cys Asn Pro Ala Cys Ala Pro Cys | (SEQ ID NO. 761) |
| Cys Cys Glu Ile Cys Cys Asn Pro Ala Cys Ala Pro Cys | (SEQ ID NO. 762) |
| Cys Cys Glu Lys Cys Cys Asn Pro Ala Cys Ala Pro Cys | (SEQ ID NO. 763) |
| Cys Cys Glu Met Cys Cys Asn Pro Ala Cys Ala Pro Cys | (SEQ ID NO. 764) |
| Cys Cys Glu Asn Cys Cys Asn Pro Ala Cys Ala Pro Cys | (SEQ ID NO. 765) |
| Cys Cys Glu Pro Cys Cys Asn Pro Ala Cys Ala Pro Cys | (SEQ ID NO. 766) |
| Cys Cys Glu Gln Cys Cys Asn Pro Ala Cys Ala Pro Cys | (SEQ ID NO. 767) |
| Cys Cys Glu Arg Cys Cys Asn Pro Ala Cys Ala Pro Cys | (SEQ ID NO. 768) |
| Cys Cys Glu Ser Cys Cys Asn Pro Ala Cys Ala Pro Cys | (SEQ ID NO. 769) |
| Cys Cys Glu Thr Cys Cys Asn Pro Ala Cys Ala Pro Cys | (SEQ ID NO. 770) |
| Cys Cys Glu Val Cys Cys Asn Pro Ala Cys Ala Pro Cys | (SEQ ID NO. 771) |
| Cys Cys Glu Trp Cys Cys Asn Pro Ala Cys Ala Pro Cys | (SEQ ID NO. 772) |
| Cys Cys Glu Tyr Cys Cys Asn Pro Ala Cys Ala Pro Cys | (SEQ ID NO. 773) |
| Cys Cys Glu Leu Cys Cys Asn Pro Ala Cys Phe Gly Cys | (SEQ ID NO. 774) |
| Cys Cys Glu Ala Cys Cys Asn Pro Ala Cys Phe Gly Cys | (SEQ ID NO. 775) |
| Cys Cys Glu Cys Cys Cys Asn Pro Ala Cys Phe Gly Cys | (SEQ ID NO. 776) |
| Cys Cys Glu Asp Cys Cys Asn Pro Ala Cys Phe Gly Cys | (SEQ ID NO. 777) |
| Cys Cys Glu Glu Cys Cys Asn Pro Ala Cys Phe Gly Cys | (SEQ ID NO. 778) |
| Cys Cys Glu Phe Cys Cys Asn Pro Ala Cys Phe Gly Cys | (SEQ ID NO. 779) |
| Cys Cys Glu Gly Cys Cys Asn Pro Ala Cys Phe Gly Cys | (SEQ ID NO. 780) |
| Cys Cys Glu His Cys Cys Asn Pro Ala Cys Phe Gly Cys | (SEQ ID NO. 781) |
| Cys Cys Glu Ile Cys Cys Asn Pro Ala Cys Phe Gly Cys | (SEQ ID NO. 782) |
| Cys Cys Glu Lys Cys Cys Asn Pro Ala Cys Phe Gly Cys | (SEQ ID NO. 783) |
| Cys Cys Glu Met Cys Cys Asn Pro Ala Cys Phe Gly Cys | (SEQ ID NO. 784) |
| Cys Cys Glu Asn Cys Cys Asn Pro Ala Cys Phe Gly Cys | (SEQ ID NO. 785) |
| Cys Cys Glu Pro Cys Cys Asn Pro Ala Cys Phe Gly Cys | (SEQ ID NO. 786) |
| Cys Cys Glu Gln Cys Cys Asn Pro Ala Cys Phe Gly Cys | (SEQ ID NO. 787) |
| Cys Cys Glu Arg Cys Cys Asn Pro Ala Cys Phe Gly Cys | (SEQ ID NO. 788) |
| Cys Cys Glu Ser Cys Cys Asn Pro Ala Cys Phe Gly Cys | (SEQ ID NO. 789) |
| Cys Cys Glu Thr Cys Cys Asn Pro Ala Cys Phe Gly Cys | (SEQ ID NO. 790) |
| Cys Cys Glu Val Cys Cys Asn Pro Ala Cys Phe Gly Cys | (SEQ ID NO. 791) |
| Cys Cys Glu Trp Cys Cys Asn Pro Ala Cys Phe Gly Cys | (SEQ ID NO. 792) |
| Cys Cys Glu Tyr Cys Cys Asn Pro Ala Cys Phe Gly Cys | (SEQ ID NO. 793) |
| Cys Cys Glu Val Cys Cys Asn Pro Ala Cys Ala Gly Cys | (SEQ ID NO. 794) |
| Cys Cys Glu Ala Cys Cys Asn Pro Ala Cys Ala Gly Cys | (SEQ ID NO. 795) |
| Cys Cys Glu Cys Cys Cys Asn Pro Ala Cys Ala Gly Cys | (SEQ ID NO. 796) |
| Cys Cys Glu Asp Cys Cys Asn Pro Ala Cys Ala Gly Cys | (SEQ ID NO. 797) |
| Cys Cys Glu Glu Cys Cys Asn Pro Ala Cys Ala Gly Cys | (SEQ ID NO. 798) |
| Cys Cys Glu Phe Cys Cys Asn Pro Ala Cys Ala Gly Cys | (SEQ ID NO. 799) |
| Cys Cys Glu Gly Cys Cys Asn Pro Ala Cys Ala Gly Cys | (SEQ ID NO. 800) |
| Cys Cys Glu His Cys Cys Asn Pro Ala Cys Ala Gly Cys | (SEQ ID NO. 801) |
| Cys Cys Glu Ile Cys Cys Asn Pro Ala Cys Ala Gly Cys | (SEQ ID NO. 802) |
| Cys Cys Glu Lys Cys Cys Asn Pro Ala Cys Ala Gly Cys | (SEQ ID NO. 803) |
| Cys Cys Glu Leu Cys Cys Asn Pro Ala Cys Ala Gly Cys | (SEQ ID NO. 804) |
| Cys Cys Glu Met Cys Cys Asn Pro Ala Cys Ala Gly Cys | (SEQ ID NO. 210) |
| Cys Cys Glu Asn Cys Cys Asn Pro Ala Cys Ala Gly Cys | (SEQ ID NO. 211) |
| Cys Cys Glu Pro Cys Cys Asn Pro Ala Cys Ala Gly Cys | (SEQ ID NO. 212) |
| Cys Cys Glu Gln Cys Cys Asn Pro Ala Cys Ala Gly Cys | (SEQ ID NO. 213) |
| Cys Cys Glu Arg Cys Cys Asn Pro Ala Cys Ala Gly Cys | (SEQ ID NO. 214) |
| Cys Cys Glu Ser Cys Cys Asn Pro Ala Cys Ala Gly Cys | (SEQ ID NO. 215) |
| Cys Cys Glu Thr Cys Cys Asn Pro Ala Cys Ala Gly Cys | (SEQ ID NO. 216) |
| Cys Cys Glu Trp Cys Cys Asn Pro Ala Cys Ala Gly Cys | (SEQ ID NO. 217) |
| Cys Cys Glu Tyr Cys Cys Asn Pro Ala Cys Ala Gly Cys | (SEQ ID NO. 218) |
| Cys Cys Glu Leu Cys Cys Asn Pro Ala Cys Thr Gly Cys Tyr | (SEQ ID NO: 219) |
| Cys Cys Glu Tyr Cys Cys Asn Pro Ala Cys Thr Gly Cys Tyr | (SEQ ID NO: 805) |
| and | |
| Cys Cys Glu Leu Cys Cys Asn Pro Ala Cys Thr Gly Cys. | (SEQ ID NO: 806) |

[0340] In some cases: D′ comprises an amino acid sequence selected from SEQ ID NOs: 807-847, respectively, as shown below:

(SEQ ID NO: 807)
Cys Cys Glu Ala Cys Cys Asn Pro Ala Cys Thr
Gly Cys
(SEQ ID NO: 808)
Cys Cys Glu Arg Cys Cys Asn Pro Ala Cys Thr
Gly Cys
(SEQ ID NO: 809)
Cys Cys Glu Asn Cys Cys Asn Pro Ala Cys Thr
Gly Cys
(SEQ ID NO: 810)
Cys Cys Glu Asp Cys Cys Asn Pro Ala Cys Thr
Gly Cys
(SEQ ID NO: 811)
Cys Cys Glu Cys Cys Cys Asn Pro Ala Cys Thr
Gly Cys
(SEQ ID NO: 812)
Cys Cys Glu Gln Cys Cys Asn Pro Ala Cys Thr
Gly Cys
(SEQ ID NO: 813)
Cys Cys Glu Glu Cys Cys Asn Pro Ala Cys Thr
Gly Cys
(SEQ ID NO: 814)
Cys Cys Glu Gly Cys Cys Asn Pro Ala Cys Thr
Gly Cys
(SEQ ID NO: 815)
Cys Cys Glu His Cys Cys Asn Pro Ala Cys Thr
Gly Cys
(SEQ ID NO: 816)
Cys Cys Glu Ile Cys Cys Asn Pro Ala Cys Thr
Gly Cys
(SEQ ID NO: 817)
Cys Cys Glu Lys Cys Cys Asn Pro Ala Cys Thr
Gly Cys
(SEQ ID NO: 818)
Cys Cys Glu Met Cys Cys Asn Pro Ala Cys Thr
Gly Cys
(SEQ ID NO: 819)
Cys Cys Glu Phe Cys Cys Asn Pro Ala Cys Thr
Gly Cys
(SEQ ID NO: 820)
Cys Cys Glu Pro Cys Cys Asn Pro Ala Cys Thr
Gly Cys
(SEQ ID NO: 821)
Cys Cys Glu Ser Cys Cys Asn Pro Ala Cys Thr
Gly Cys
(SEQ ID NO: 822)
Cys Cys Glu Thr Cys Cys Asn Pro Ala Cys Thr
Gly Cys
(SEQ ID NO: 823)
Cys Cys Glu Trp Cys Cys Asn Pro Ala Cys Thr
Gly Cys
(SEQ ID NO: 824)
Cys Cys Glu Val Cys Cys Asn Pro Ala Cys Thr
Gly Cys
(SEQ ID NO: 825)
Cys Cys Glu Tyr Cys Cys Asn Pro Ala Cys Thr
Gly Cys
(SEQ ID NO: 826)
Cys Cys Glu Leu Cys Cys Asn Pro Ala Cys Thr
Gly Cys
(SEQ ID NO: 827)
Cys Cys Glu Ala Cys Cys Asn Pro Ala Cys Thr
Gly Cys Tyr
(SEQ ID NO: 828)
Cys Cys Glu Arg Cys Cys Asn Pro Ala Cys Thr
Gly Cys Tyr
(SEQ ID NO: 829)
Cys Cys Glu Asn Cys Cys Asn Pro Ala Cys Thr
Gly Cys Tyr
(SEQ ID NO: 830)
Cys Cys Glu Asp Cys Cys Asn Pro Ala Cys Thr
Gly Cys Tyr
(SEQ ID NO: 831)
Cys Cys Glu Cys Cys Cys Asn Pro Ala Cys Thr
Gly Cys Tyr
(SEQ ID NO: 832)
Cys Cys Glu Gln Cys Cys Asn Pro Ala Cys Thr
Gly Cys Tyr
(SEQ ID NO: 833)
Cys Cys Glu Glu Cys Cys Asn Pro Ala Cys Thr
Gly Cys Tyr
(SEQ ID NO: 834)
Cys Cys Glu Gly Cys Cys Asn Pro Ala Cys Thr
Gly Cys Tyr
(SEQ ID NO: 835)
Cys Cys Glu His Cys Cys Asn Pro Ala Cys Thr
Gly Cys Tyr
(SEQ ID NO: 836)
Cys Cys Glu Ile Cys Cys Asn Pro Ala Cys Thr
Gly Cys Tyr
(SEQ ID NO: 837)
Cys Cys Glu Lys Cys Cys Asn Pro Ala Cys Thr
Gly Cys Tyr
(SEQ ID NO: 838)
Cys Cys Glu Met Cys Cys Asn Pro Ala Cys Thr
Gly Cys Tyr
(SEQ ID NO: 839)
Cys Cys Glu Phe Cys Cys Asn Pro Ala Cys Thr
Gly Cys Tyr
(SEQ ID NO: 840)
Cys Cys Glu Pro Cys Cys Asn Pro Ala Cys Thr
Gly Cys Tyr
(SEQ ID NO: 841)
Cys Cys Glu Ser Cys Cys Asn Pro Ala Cys Thr
Gly Cys Tyr
(SEQ ID NO: 842)
Cys Cys Glu Thr Cys Cys Asn Pro Ala Cys Thr
Gly Cys Tyr
(SEQ ID NO: 843)
Cys Cys Glu Trp Cys Cys Asn Pro Ala Cys Thr
Gly Cys Tyr
(SEQ ID NO: 844)
Cys Cys Glu Val Cys Cys Asn Pro Ala Cys Thr
Gly Cys Tyr
(SEQ ID NO: 845)
Cys Cys Glu Tyr Cys Cys Asn Pro Ala Cys Thr
Gly Cys Tyr
(SEQ ID NO: 846)
Cys Cys Glu Leu Cys Cys Asn Pro Ala Cys Thr
Gly Cys Tyr

[0341] Among the useful peptides are peptides comprising, consisting of or consisting essentially of the amino acid sequence Xaa₁ Xaa₂ Xaa₃ Xaa₄ Xaa₅ Cys Cys Glu Xaa₉ Cys Cys Asn Pro Ala Cys Thr Gly Cys Tyr Xaa₂₀ Xaa₂₁ (SEQ ID NO:64) are the following peptides (SEQ ID NOs: 848-910, respectively, as shown below):

(SEQ ID NO: 849)
Gln Ser Ser Asn Tyr Cys Cys Glu Tyr Cys Cys
Asn Pro Ala Cys Thr Gly Cys Tyr
(SEQ ID NO: 850)
Asn Thr Ser Asn Tyr Cys Cys Glu Tyr Cys Cys
Asn Pro Ala Cys Thr Gly Cys Tyr
(SEQ ID NO: 851)
Asn Leu Ser Asn Tyr Cys Cys Glu Tyr Cys Cys
Asn Pro Ala Cys Thr Gly Cys Tyr
(SEQ ID NO: 852)
Asn Ile Ser Asn Tyr Cys Cys Glu Tyr Cys Cys
Asn Pro Ala Cys Thr Gly Cys Tyr
(SEQ ID NO: 853)
Asn Ser Ser Gln Tyr Cys Cys Glu Tyr Cys Cys
Asn Pro Ala Cys Thr Gly Cys Tyr
(SEQ ID NO: 854)
Ser Ser Asn Tyr Cys Cys Glu Tyr Cys Cys Asn
Pro Ala Cys Thr Gly Cys Tyr
(SEQ ID NO: 855)
Gln Ser Ser Gln Tyr Cys Cys Glu Tyr Cys Cys
Asn Pro Ala Cys Thr Gly Cys Tyr
(SEQ ID NO: 856)
Ser Ser Gln Tyr Cys Cys Glu Tyr Cys Cys Asn
Pro Ala Cys Thr Gly Cys Tyr
(SEQ ID NO: 857)
Asn Ser Ser Asn Tyr Cys Cys Glu Ala Cys Cys
Asn Pro Ala Cys Thr Gly Cys Tyr
(SEQ ID NO: 858)
Asn Ser Ser Asn Tyr Cys Cys Glu Arg Cys Cys
Asn Pro Ala Cys Thr Gly Cys Tyr
(SEQ ID NO: 859)
Asn Ser Ser Asn Tyr Cys Cys Glu Asn Cys Cys
Asn Pro Ala Cys Thr Gly Cys Tyr
(SEQ ID NO: 860)
Asn Ser Ser Asn Tyr Cys Cys Glu Asp Cys Cys
Asn Pro Ala Cys Thr Gly Cys Tyr
(SEQ ID NO: 861)
Asn Ser Ser Asn Tyr Cys Cys Glu Cys Cys Cys
Asn Pro Ala Cys Thr Gly Cys Tyr
(SEQ ID NO: 862)
Asn Ser Ser Asn Tyr Cys Cys Glu Gln Cys Cys
Asn Pro Ala Cys Thr Gly Cys Tyr
(SEQ ID NO: 863)
Asn Ser Ser Asn Tyr Cys Cys Glu Glu Cys Cys
Asn Pro Ala Cys Thr Gly Cys Tyr
(SEQ ID NO: 864)
Asn Ser Ser Asn Tyr Cys Cys Glu Gly Cys Cys
Asn Pro Ala Cys Thr Gly Cys Tyr
(SEQ ID NO: 865)
Asn Ser Ser Asn Tyr Cys Cys Glu His Cys Cys
Asn Pro Ala Cys Thr Gly Cys Tyr
(SEQ ID NO: 866)
Asn Ser Ser Asn Tyr Cys Cys Glu Ile Cys Cys
Asn Pro Ala Cys Thr Gly Cys Tyr
(SEQ ID NO: 867)
Asn Ser Ser Asn Tyr Cys Cys Glu Lys Cys Cys
Asn Pro Ala Cys Thr Gly Cys Tyr
(SEQ ID NO: 868)
Asn Ser Ser Asn Tyr Cys Cys Glu Met Cys Cys
Asn Pro Ala Cys Thr Gly Cys Tyr
(SEQ ID NO: 869)
Asn Ser Ser Asn Tyr Cys Cys Glu Phe Cys Cys
Asn Pro Ala Cys Thr Gly Cys Tyr
(SEQ ID NO: 870)
Asn Ser Ser Asn Tyr Cys Cys Glu Pro Cys Cys
Asn Pro Ala Cys Thr Gly Cys Tyr
(SEQ ID NO: 871)
Asn Ser Ser Asn Tyr Cys Cys Glu Ser Cys Cys
Asn Pro Ala Cys Thr Gly Cys Tyr
(SEQ ID NO: 872)
Asn Ser Ser Asn Tyr Cys Cys Glu Thr Cys Cys
Asn Pro Ala Cys Thr Gly Cys Tyr
(SEQ ID NO: 873)
Asn Ser Ser Asn Tyr Cys Cys Glu Trp Cys Cys
Asn Pro Ala Cys Thr Gly Cys Tyr
(SEQ ID NO: 874)
Asn Ser Ser Asn Tyr Cys Cys Glu Val Cys Cys
Asn Pro Ala Cys Thr Gly Cys Tyr
(SEQ ID NO: 875)
Cys Cys Glu Ala Cys Cys Asn Pro Ala Cys Thr
Gly Cys Tyr
(SEQ ID NO: 876)
Cys Cys Glu Arg Cys Cys Asn Pro Ala Cys Thr
Gly Cys Tyr
(SEQ ID NO: 877)
Cys Cys Glu Asn Cys Cys Asn Pro Ala Cys Thr
Gly Cys Tyr
(SEQ ID NO: 878)
Cys Cys Glu Asp Cys Cys Asn Pro Ala Cys Thr
Gly Cys Tyr
(SEQ ID NO: 879)
Cys Cys Glu Cys Cys Cys Asn Pro Ala Cys Thr
Gly Cys Tyr
(SEQ ID NO: 880)
Cys Cys Glu Gln Cys Cys Asn Pro Ala Cys Thr
Gly Cys Tyr
(SEQ ID NO: 881)
Cys Cys Glu Glu Cys Cys Asn Pro Ala Cys Thr
Gly Cys Tyr
(SEQ ID NO: 882)
Cys Cys Glu Gly Cys Cys Asn Pro Ala Cys Thr
Gly Cys Tyr
(SEQ ID NO: 883)
Cys Cys Glu His Cys Cys Asn Pro Ala Cys Thr
Gly Cys Tyr
(SEQ ID NO: 884)
Cys Cys Glu Ile Cys Cys Asn Pro Ala Cys Thr
Gly Cys Tyr
(SEQ ID NO: 885)
Cys Cys Glu Lys Cys Cys Asn Pro Ala Cys Thr
Gly Cys Tyr
(SEQ ID NO: 886)
Cys Cys Glu Met Cys Cys Asn Pro Ala Cys Thr
Gly Cys Tyr
(SEQ ID NO: 887)
Cys Cys Glu Phe Cys Cys Asn Pro Ala Cys Thr
Gly Cys Tyr
(SEQ ID NO: 888)
Cys Cys Glu Pro Cys Cys Asn Pro Ala Cys Thr
Gly Cys Tyr
(SEQ ID NO: 889)
Cys Cys Glu Ser Cys Cys Asn Pro Ala Cys Thr
Gly Cys Tyr
(SEQ ID NO: 890)
Cys Cys Glu Thr Cys Cys Asn Pro Ala Cys Thr
Gly Cys Tyr
(SEQ ID NO: 891)
Cys Cys Glu Trp Cys Cys Asn Pro Ala Cys Thr
Gly Cys Tyr
(SEQ ID NO: 892)
Cys Cys Glu Val Cys Cys Asn Pro Ala Cys Thr
Gly Cys Tyr
(SEQ ID NO: 893)
Cys Cys Glu Tyr Cys Cys Asn Pro Ala Cys Thr
Gly Cys
(SEQ ID NO: 894)
Cys Cys Glu Ala Cys Cys Asn Pro Ala Cys Thr
Gly Cys
(SEQ ID NO: 895)
Cys Cys Glu Arg Cys Cys Asn Pro Ala Cys Thr
Gly Cys
(SEQ ID NO: 896)
Cys Cys Glu Asn Cys Cys Asn Pro Ala Cys Thr
Gly Cys
(SEQ ID NO: 897)
Cys Cys Glu Asp Cys Cys Asn Pro Ala Cys Thr
Gly Cys
(SEQ ID NO: 898)
Cys Cys Glu Cys Cys Cys Asn Pro Ala Cys Thr
Gly Cys
(SEQ ID NO: 899)
Cys Cys Glu Gln Cys Cys Asn Pro Ala Cys Thr
Gly Cys
(SEQ ID NO: 900)
Cys Cys Glu Glu Cys Cys Asn Pro Ala Cys Thr
Gly Cys
(SEQ ID NO: 901)
Cys Cys Glu Gly Cys Cys Asn Pro Ala Cys Thr
Gly Cys
(SEQ ID NO: 902)
Cys Cys Glu His Cys Cys Asn Pro Ala Cys Thr
Gly Cys
(SEQ ID NO: 903)
Cys Cys Glu Ile Cys Cys Asn Pro Ala Cys Thr
Gly Cys
(SEQ ID NO: 904)
Cys Cys Glu Lys Cys Cys Asn Pro Ala Cys Thr
Gly Cys
(SEQ ID NO: 905)
Cys Cys Glu Met Cys Cys Asn Pro Ala Cys Thr
Gly Cys
(SEQ ID NO: 906)
Cys Cys Glu Phe Cys Cys Asn Pro Ala Cys Thr
Gly Cys
(SEQ ID NO: 907)
Cys Cys Glu Pro Cys Cys Asn Pro Ala Cys Thr
Gly Cys
(SEQ ID NO: 908)
Cys Cys Glu Ser Cys Cys Asn Pro Ala Cys Thr
Gly Cys
(SEQ ID NO: 909)
Cys Cys Glu Thr Cys Cys Asn Pro Ala Cys Thr
Gly Cys;
(SEQ ID NO: 910)
Cys Cys Glu Trp Cys Cys Asn Pro Ala Cys Thr
Gly Cys
(SEQ ID NO: 847)
Cys Cys Glu Val Cys Cys Asn Pro Ala Cys Thr
Gly Cys.

[0342] Also useful are peptides wherein D′ comprises the, consists of or consists essentially of any of the following sequences (SEQ ID NOs: 911-1422, respectively, as shown below):

(SEQ ID NO: 911
Cys Cys Glu Leu Cys Cys Ala Pro Ala Cys Thr
Gly Cys Tyr
(SEQ ID NO: 912
Cys Cys Glu Leu Cys Cys Val Pro Ala Cys Thr
Gly Cys Tyr
(SEQ ID NO: 913
Cys Cys Glu Leu Cys Cys Leu Pro Ala Cys Thr
Gly Cys Tyr
(SEQ ID NO: 914
Cys Cys Glu Leu Cys Cys Ile Pro Ala Cys Thr
Gly Cys Tyr
(SEQ ID NO: 915
Cys Cys Glu Leu Cys Cys Pro Pro Ala Cys Thr
Gly Cys Tyr
(SEQ ID NO: 916
Cys Cys Glu Leu Cys Cys Met Pro Ala Cys Thr
Gly Cys Tyr
(SEQ ID NO: 917
Cys Cys Glu Leu Cys Cys Phe Pro Ala Cys Thr
Gly Cys Tyr
(SEQ ID NO: 918
Cys Cys Glu Leu Cys Cys Trp Pro Ala Cys Thr
Gly Cys Tyr
(SEQ ID NO: 919
Cys Cys Glu Leu Cys Cys Gly Pro Ala Cys Thr
Gly Cys Tyr
(SEQ ID NO: 920
Cys Cys Glu Leu Cys Cys Ser Pro Ala Cys Thr
Gly Cys Tyr
(SEQ ID NO: 921
Cys Cys Glu Leu Cys Cys Thr Pro Ala Cys Thr
Gly Cys Tyr
(SEQ ID NO: 922
Cys Cys Glu Leu Cys Cys Cys Pro Ala Cys Thr
Gly Cys Tyr
(SEQ ID NO: 923
Cys Cys Glu Leu Cys Cys Gln Pro Ala Cys Thr
Gly Cys Tyr
(SEQ ID NO: 924
Cys Cys Glu Leu Cys Cys Tyr Pro Ala Cys Thr
Gly Cys Tyr
(SEQ ID NO: 925
Cys Cys Glu Leu Cys Cys Asp Pro Ala Cys Thr
Gly Cys Tyr
(SEQ ID NO: 926
Cys Cys Glu Leu Cys Cys Glu Pro Ala Cys Thr
Gly Cys Tyr
(SEQ ID NO: 927
Cys Cys Glu Leu Cys Cys Lys Pro Ala Cys Thr
Gly Cys Tyr
(SEQ ID NO: 928
Cys Cys Glu Leu Cys Cys Arg Pro Ala Cys Thr
Gly Cys Tyr
(SEQ ID NO: 929
Cys Cys Glu Leu Cys Cys His Pro Ala Cys Thr
Gly Cys Tyr
(SEQ ID NO: 930
Cys Cys Glu Tyr Cys Cys Ala Pro Ala Cys Thr
Gly Cys Tyr
(SEQ ID NO: 931
Cys Cys Glu Tyr Cys Cys Val Pro Ala Cys Thr
Gly Cys Tyr
(SEQ ID NO: 932
Cys Cys Glu Tyr Cys Cys Leu Pro Ala Cys Thr
Gly Cys Tyr
(SEQ ID NO: 933
Cys Cys Glu Tyr Cys Cys Ile Pro Ala Cys Thr
Gly Cys Tyr
(SEQ ID NO: 934
Cys Cys Glu Tyr Cys Cys Pro Pro Ala Cys Thr
Gly Cys Tyr
(SEQ ID NO: 935
Cys Cys Glu Tyr Cys Cys Met Pro Ala Cys Thr
Gly Cys Tyr
(SEQ ID NO: 936
Cys Cys Glu Tyr Cys Cys Phe Pro Ala Cys Thr
Gly Cys Tyr
(SEQ ID NO: 937
Cys Cys Glu Tyr Cys Cys Trp Pro Ala Cys Thr
Gly Cys Tyr
(SEQ ID NO: 938
Cys Cys Glu Tyr Cys Cys Gly Pro Ala Cys Thr
Gly Cys Tyr
(SEQ ID NO: 939
Cys Cys Glu Tyr Cys Cys Ser Pro Ala Cys Thr
Gly Cys Tyr
(SEQ ID NO: 940
Cys Cys Glu Tyr Cys Cys Thr Pro Ala Cys Thr
Gly Cys Tyr
(SEQ ID NO: 941
Cys Cys Glu Tyr Cys Cys Cys Pro Ala Cys Thr
Gly Cys Tyr
(SEQ ID NO: 942
Cys Cys Glu Tyr Cys Cys Gln Pro Ala Cys Thr
Gly Cys Tyr
(SEQ ID NO: 943
Cys Cys Glu Tyr Cys Cys Tyr Pro Ala Cys Thr
Gly Cys Tyr
(SEQ ID NO: 944
Cys Cys Glu Tyr Cys Cys Asp Pro Ala Cys Thr
Gly Cys Tyr
(SEQ ID NO: 945
Cys Cys Glu Tyr Cys Cys Glu Pro Ala Cys Thr
Gly Cys Tyr
(SEQ ID NO: 946
Cys Cys Glu Tyr Cys Cys Lys Pro Ala Cys Thr
Gly Cys Tyr
(SEQ ID NO: 947
Cys Cys Glu Tyr Cys Cys Arg Pro Ala Cys Thr
Gly Cys Tyr
(SEQ ID NO: 948
Cys Cys Glu Tyr Cys Cys His Pro Ala Cys Thr
Gly Cys Tyr
(SEQ ID NO: 949
Cys Cys Glu Leu Cys Cys Ala Pro Ala Cys Thr
Gly Cys
(SEQ ID NO: 950
Cys Cys Glu Leu Cys Cys Val Pro Ala Cys Thr
Gly Cys
(SEQ ID NO: 951
Cys Cys Glu Leu Cys Cys Leu Pro Ala Cys Thr
Gly Cys
(SEQ ID NO: 952
Cys Cys Glu Leu Cys Cys Ile Pro Ala Cys Thr
Gly Cys
(SEQ ID NO: 953
Cys Cys Glu Leu Cys Cys Pro Pro Ala Cys Thr
Gly Cys
(SEQ ID NO: 954
Cys Cys Glu Leu Cys Cys Met Pro Ala Cys Thr
Gly Cys
(SEQ ID NO: 955
Cys Cys Glu Leu Cys Cys Phe Pro Ala Cys Thr
Gly Cys
(SEQ ID NO: 956
Cys Cys Glu Leu Cys Cys Trp Pro Ala Cys Thr
Gly Cys
(SEQ ID NO: 957
Cys Cys Glu Leu Cys Cys Gly Pro Ala Cys Thr
Gly Cys
(SEQ ID NO: 958
Cys Cys Glu Leu Cys Cys Ser Pro Ala Cys Thr
Gly Cys
(SEQ ID NO: 959
Cys Cys Glu Leu Cys Cys Thr Pro Ala Cys Thr
Gly Cys
(SEQ ID NO: 960
Cys Cys Glu Leu Cys Cys Cys Pro Ala Cys Thr
Gly Cys
(SEQ ID NO: 961
Cys Cys Glu Leu Cys Cys Gln Pro Ala Cys Thr
Gly Cys
(SEQ ID NO: 962
Cys Cys Glu Leu Cys Cys Tyr Pro Ala Cys Thr
Gly Cys
(SEQ ID NO: 963
Cys Cys Glu Leu Cys Cys Asp Pro Ala Cys Thr
Gly Cys
(SEQ ID NO: 964
Cys Cys Glu Leu Cys Cys Glu Pro Ala Cys Thr
Gly Cys
(SEQ ID NO: 965
Cys Cys Glu Leu Cys Cys Lys Pro Ala Cys Thr
Gly Cys
(SEQ ID NO: 966
Cys Cys Glu Leu Cys Cys Arg Pro Ala Cys Thr
Gly Cys
(SEQ ID NO: 967
Cys Cys Glu Leu Cys Cys His Pro Ala Cys Thr
Gly Cys
(SEQ ID NO: 968
Cys Cys Glu Tyr Cys Cys Ala Pro Ala Cys Thr
Gly Cys
(SEQ ID NO: 969
Cys Cys Glu Tyr Cys Cys Val Pro Ala Cys Thr
Gly Cys
(SEQ ID NO: 970
Cys Cys Glu Tyr Cys Cys Leu Pro Ala Cys Thr
Gly Cys
(SEQ ID NO: 971
Cys Cys Glu Tyr Cys Cys Ile Pro Ala Cys Thr
Gly Cys
(SEQ ID NO: 972
Cys Cys Glu Tyr Cys Cys Pro Pro Ala Cys Thr
Gly Cys
(SEQ ID NO: 973
Cys Cys Glu Tyr Cys Cys Met Pro Ala Cys Thr
Gly Cys
(SEQ ID NO: 974
Cys Cys Glu Tyr Cys Cys Phe Pro Ala Cys Thr
Gly Cys
(SEQ ID NO: 975
Cys Cys Glu Tyr Cys Cys Trp Pro Ala Cys Thr
Gly Cys
(SEQ ID NO: 976
Cys Cys Glu Tyr Cys Cys Gly Pro Ala Cys Thr
Gly Cys
(SEQ ID NO: 977
Cys Cys Glu Tyr Cys Cys Ser Pro Ala Cys Thr
Gly Cys
(SEQ ID NO: 978
Cys Cys Glu Tyr Cys Cys Thr Pro Ala Cys Thr
Gly Cys
(SEQ ID NO: 979
Cys Cys Glu Tyr Cys Cys Cys Pro Ala Cys Thr
Gly Cys
(SEQ ID NO: 980
Cys Cys Glu Tyr Cys Cys Gln Pro Ala Cys Thr
Gly Cys
(SEQ ID NO: 981
Cys Cys Glu Tyr Cys Cys Tyr Pro Ala Cys Thr
Gly Cys
(SEQ ID NO: 982
Cys Cys Glu Tyr Cys Cys Asp Pro Ala Cys Thr
Gly Cys
(SEQ ID NO: 983
Cys Cys Glu Tyr Cys Cys Glu Pro Ala Cys Thr
Gly Cys
(SEQ ID NO: 984
Cys Cys Glu Tyr Cys Cys Lys Pro Ala Cys Thr
Gly Cys
(SEQ ID NO: 985
Cys Cys Glu Tyr Cys Cys Arg Pro Ala Cys Thr
Gly Cys
(SEQ ID NO: 986
Cys Cys Glu Tyr Cys Cys His Pro Ala Cys Thr
Gly Cys
(SEQ ID NO: 987
Cys Cys Glu Leu Cys Cys Asn Pro Thr Cys Thr
Gly Cys Tyr
(SEQ ID NO: 988
Cys Cys Glu Tyr Cys Cys Asn Pro Thr Cys Thr
Gly Cys Tyr
(SEQ ID NO: 989
Cys Cys Glu Leu Cys Cys Asn Pro Thr Cys Thr
Gly Cys
(SEQ ID NO: 990
Cys Cys Glu Tyr Cys Cys Asn Pro Thr Cys Thr
Gly Cys
(SEQ ID NO: 991
Cys Cys Glu Phe Cys Cys Asn Pro Thr Cys Thr
Gly Cys Tyr
(SEQ ID NO: 992
Cys Cys Glu Phe Cys Cys Asn Pro Thr Cys Thr
Gly Cys
(SEQ ID NO: 993
Cys Cys Glu Trp Cys Cys Asn Pro Thr Cys Thr
Gly Cys Tyr
(SEQ ID NO: 994
Cys Cys Glu Trp Cys Cys Asn Pro Thr Cys Thr
Gly Cys
(SEQ ID NO: 995
Cys Cys Glu Leu Cys Cys Asn Gly Ala Cys Thr
Gly Cys Tyr
(SEQ ID NO: 996
Cys Cys Glu Tyr Cys Cys Asn Gly Ala Cys Thr
Gly Cys Tyr
(SEQ ID NO: 997
Cys Cys Glu Leu Cys Cys Asn Gly Ala Cys Thr
Gly Cys
(SEQ ID NO: 998
Cys Cys Glu Tyr Cys Cys Asn Gly Ala Cys Thr
Gly Cys
(SEQ ID NO: 999
Cys Cys Glu Phe Cys Cys Asn Gly Ala Cys Thr
Gly Cys Tyr
(SEQ ID NO: 1000
Cys Cys Glu Phe Cys Cys Asn Gly Ala Cys Thr
Gly Cys
(SEQ ID NO: 1001
Cys Cys Glu Trp Cys Cys Asn Gly Ala Cys Thr
Gly Cys Tyr
(SEQ ID NO: 1002
Cys Cys Glu Trp Cys Cys Asn Gly Ala Cys Thr
Gly Cys
(SEQ ID NO: 1003
Cys Cys Glu Leu Cys Cys Asn Pro Ala Cys Val
Gly Cys Tyr
(SEQ ID NO: 1004
Cys Cys Glu Tyr Cys Cys Asn Pro Ala Cys Val
Gly Cys Tyr
(SEQ ID NO: 1005
Cys Cys Glu Leu Cys Cys Asn Pro Ala Cys Val
Gly Cys
(SEQ ID NO: 1006
Cys Cys Glu Tyr Cys Cys Asn Pro Ala Cys Val
Gly Cys
(SEQ ID NO: 1007
Cys Cys Glu Phe Cys Cys Asn Pro Ala Cys Val
Gly Cys Tyr
(SEQ ID NO: 1008
Cys Cys Glu Phe Cys Cys Asn Pro Ala Cys Val
Gly Cys
(SEQ ID NO: 1009
Cys Cys Glu Trp Cys Cys Asn Pro Ala Cys Val
Gly Cys Tyr
(SEQ ID NO: 1010
Cys Cys Glu Trp Cys Cys Asn Pro Ala Cys Val
Gly Cys
(SEQ ID NO: 1011
Cys Cys Glu Leu Cys Cys Asn Pro Ala Cys Gly
Gly Cys Tyr
(SEQ ID NO: 1012
Cys Cys Glu Tyr Cys Cys Asn Pro Ala Cys Gly
Gly Cys Tyr
(SEQ ID NO: 1013
Cys Cys Glu Leu Cys Cys Asn Pro Ala Cys Gly
Gly Cys
(SEQ ID NO: 1014
Cys Cys Glu Tyr Cys Cys Asn Pro Ala Cys Gly
Gly Cys
(SEQ ID NO: 1015
Cys Cys Glu Phe Cys Cys Asn Pro Ala Cys Gly
Gly Cys Tyr
(SEQ ID NO: 1016
Cys Cys Glu Phe Cys Cys Asn Pro Ala Cys Gly
Gly Cys
(SEQ ID NO: 1017
Cys Cys Glu Trp Cys Cys Asn Pro Ala Cys Gly
Gly Cys Tyr
(SEQ ID NO: 1018
Cys Cys Glu Trp Cys Cys Asn Pro Ala Cys Gly
Gly Cys
(SEQ ID NO: 1019
Cys Cys Glu Leu Cys Cys Asn Pro Ala Cys Thr
Ala Cys Tyr
(SEQ ID NO: 1020
Cys Cys Glu Tyr Cys Cys Asn Pro Ala Cys Thr
Ala Cys Tyr
(SEQ ID NO: 1021
Cys Cys Glu Leu Cys Cys Asn Pro Ala Cys Thr
Ala Cys
(SEQ ID NO: 1022
Cys Cys Glu Tyr Cys Cys Asn Pro Ala Cys Thr
Ala Cys
(SEQ ID NO: 1023
Cys Cys Glu Trp Cys Cys Asn Pro Ala Cys Thr
Ala Cys Tyr
(SEQ ID NO: 1024
Cys Cys Glu Trp Cys Cys Asn Pro Ala Cys Thr
Ala Cys
(SEQ ID NO: 1025
Cys Cys Glu Phe Cys Cys Asn Pro Ala Cys Thr
Ala Cys Tyr
(SEQ ID NO: 1026
Cys Cys Glu Phe Cys Cys Asn Pro Ala Cys Thr
Ala Cys
(SEQ ID NO: 1027
Cys Cys Glu Leu Cys Cys Asn Pro Ala Cys Thr
Gly Cys Ala
(SEQ ID NO: 1028
Cys Cys Glu Leu Cys Cys Asn Pro Ala Cys Thr
Gly Cys Val
(SEQ ID NO: 1029
Cys Cys Glu Leu Cys Cys Asn Pro Ala Cys Thr
Gly Cys Leu
(SEQ ID NO: 1030
Cys Cys Glu Leu Cys Cys Asn Pro Ala Cys Thr
Gly Cys Ile
(SEQ ID NO: 1031
Cys Cys Glu Leu Cys Cys Asn Pro Ala Cys Thr
Gly Cys Pro
(SEQ ID NO: 1032
Cys Cys Glu Leu Cys Cys Asn Pro Ala Cys Thr
Gly Cys Met
(SEQ ID NO: 1033
Cys Cys Glu Leu Cys Cys Asn Pro Ala Cys Thr
Gly Cys Ph
(SEQ ID NO: 1034
Cys Cys Glu Leu Cys Cys Asn Pro Ala Cys Thr
Gly Cys Trp
(SEQ ID NO: 1035
Cys Cys Glu Leu Cys Cys Asn Pro Ala Cys Thr
Gly Cys Gly
(SEQ ID NO: 1036
Cys Cys Glu Leu Cys Cys Asn Pro Ala Cys Thr
Gly Cys Ser
(SEQ ID NO: 1037
Cys Cys Glu Leu Cys Cys Asn Pro Ala Cys Thr
Gly Cys Thr
(SEQ ID NO: 1038
Cys Cys Glu Leu Cys Cys Asn Pro Ala Cys Thr
Gly Cys Cys
(SEQ ID NO: 1039
Cys Cys Glu Leu Cys Cys Asn Pro Ala Cys Thr
Gly Cys Asn
(SEQ ID NO: 1040
Cys Cys Glu Leu Cys Cys Asn Pro Ala Cys Thr
Gly Cys Gln
(SEQ ID NO: 1041
Cys Cys Glu Leu Cys Cys Asn Pro Ala Cys Thr
Gly Cys Asp
(SEQ ID NO: 1042
Cys Cys Glu Leu Cys Cys Asn Pro Ala Cys Thr
Gly Cys Glu
(SEQ ID NO: 1043
Cys Cys Glu Leu Cys Cys Asn Pro Ala Cys Thr
Gly Cys Lys
(SEQ ID NO: 1044
Cys Cys Glu Leu Cys Cys Asn Pro Ala Cys Thr
Gly Cys Arg
(SEQ ID NO: 1045
Cys Cys Glu Leu Cys Cys Asn Pro Ala Cys Thr
Gly Cys His
(SEQ ID NO: 1046
Cys Cys Glu Tyr Cys Cys Asn Pro Ala Cys Thr
Gly Cys Ala
(SEQ ID NO: 1047
Cys Cys Glu Tyr Cys Cys Asn Pro Ala Cys Thr
Gly Cys Val
(SEQ ID NO: 1048
Cys Cys Glu Tyr Cys Cys Asn Pro Ala Cys Thr
Gly Cys Leu
(SEQ ID NO: 1049
Cys Cys Glu Tyr Cys Cys Asn Pro Ala Cys Thr
Gly Cys Ile
(SEQ ID NO: 1050
Cys Cys Glu Tyr Cys Cys Asn Pro Ala Cys Thr
Gly Cys Pro
(SEQ ID NO: 1051
Cys Cys Glu Tyr Cys Cys Asn Pro Ala Cys Thr
Gly Cys Met
(SEQ ID NO: 1052
Cys Cys Glu Tyr Cys Cys Asn Pro Ala Cys Thr
Gly Cys Phe
(SEQ ID NO: 1053
Cys Cys Glu Tyr Cys Cys Asn Pro Ala Cys Thr
Gly Cys Trp
(SEQ ID NO: 1054
Cys Cys Glu Tyr Cys Cys Asn Pro Ala Cys Thr
Gly Cys Gly
(SEQ ID NO: 1055
Cys Cys Glu Tyr Cys Cys Asn Pro Ala Cys Thr
Gly Cys Ser
(SEQ ID NO: 1056
Cys Cys Glu Tyr Cys Cys Asn Pro Ala Cys Thr
Gly Cys Thr
(SEQ ID NO: 1057
Cys Cys Glu Tyr Cys Cys Asn Pro Ala Cys Thr
Gly Cys Cys
(SEQ ID NO: 1058
Cys Cys Glu Tyr Cys Cys Asn Pro Ala Cys Thr
Gly Cys Asn
(SEQ ID NO: 1059
Cys Cys Glu Tyr Cys Cys Asn Pro Ala Cys Thr
Gly Cys Gln
(SEQ ID NO: 1060
Cys Cys Glu Tyr Cys Cys Asn Pro Ala Cys Thr
Gly Cys Asp
(SEQ ID NO: 1061
Cys Cys Glu Tyr Cys Cys Asn Pro Ala Cys Thr
Gly Cys Glu
(SEQ ID NO: 1062
Cys Cys Glu Tyr Cys Cys Asn Pro Ala Cys Thr
Gly Cys Lys
(SEQ ID NO: 1063
Cys Cys Glu Tyr Cys Cys Asn Pro Ala Cys Thr
Gly Cys Arg
(SEQ ID NO: 1064
Cys Cys Glu Tyr Cys Cys Asn Pro Ala Cys Thr
Gly Cys His
(SEQ ID NO: 1065
Cys Cys Ala Leu Cys Cys Asn Pro Ala Cys Thr
Gly Cys Tyr
(SEQ ID NO: 1066
Cys Cys Val Leu Cys Cys Asn Pro Ala Cys Thr
Gly Cys Tyr
(SEQ ID NO: 1067
Cys Cys Leu Leu Cys Cys Asn Pro Ala Cys Thr
Gly Cys Tyr
(SEQ ID NO: 1068
Cys Cys Ile Leu Cys Cys Asn Pro Ala Cys Thr
Gly Cys Tyr
(SEQ ID NO: 1069
Cys Cys Met Leu Cys Cys Asn Pro Ala Cys Thr
Gly Cys Tyr
(SEQ ID NO: 1070
Cys Cys Phe Leu Cys Cys Asn Pro Ala Cys Thr
Gly Cys Tyr
(SEQ ID NO: 1071
Cys Cys Trp Leu Cys Cys Asn Pro Ala Cys Thr
Gly Cys Tyr
(SEQ ID NO: 1072
Cys Cys Gly Leu Cys Cys Asn Pro Ala Cys Thr
Gly Cys Tyr
(SEQ ID NO: 1073
Cys Cys Ser Leu Cys Cys Asn Pro Ala Cys Thr
Gly Cys Tyr
(SEQ ID NO: 1074
Cys Cys Thr Leu Cys Cys Asn Pro Ala Cys Thr
Gly Cys Tyr
(SEQ ID NO: 1075
Cys Cys Cys Leu Cys Cys Asn Pro Ala Cys Thr
Gly Cys Tyr
(SEQ ID NO: 1076
Cys Cys Asn Leu Cys Cys Asn Pro Ala Cys Thr
Gly Cys Tyr
(SEQ ID NO: 1077
Cys Cys Gln Leu Cys Cys Asn Pro Ala Cys Thr
Gly Cys Tyr
(SEQ ID NO: 1078
Cys Cys Tyr Leu Cys Cys Asn Pro Ala Cys Thr
Gly Cys Tyr
(SEQ ID NO: 1079
Cys Cys Asp Leu Cys Cys Asn Pro Ala Cys Thr
Gly Cys Tyr
(SEQ ID NO: 1080
Cys Cys Lys Leu Cys Cys Asn Pro Ala Cys Thr
Gly Cys Tyr
(SEQ ID NO: 1081
Cys Cys Arg Leu Cys Cys Asn Pro Ala Cys Thr
Gly Cys Tyr
(SEQ ID NO: 1082
Cys Cys His Leu Cys Cys Asn Pro Ala Cys Thr
Gly Cys Tyr
(SEQ ID NO: 1083
Cys Cys Ala Leu Cys Cys Asn Pro Ala Cys Thr
Gly Cys
(SEQ ID NO: 1084
Cys Cys Val Leu Cys Cys Asn Pro Ala Cys Thr
Gly Cys
(SEQ ID NO: 1085
Cys Cys Leu Leu Cys Cys Asn Pro Ala Cys Thr
Gly Cys
(SEQ ID NO: 1086
Cys Cys Ile Leu Cys Cys Asn Pro Ala Cys Thr
Gly Cys
(SEQ ID NO: 1087
Cys Cys Met Leu Cys Cys Asn Pro Ala Cys Thr
Gly Cys
(SEQ ID NO: 1088
Cys Cys Phe Leu Cys Cys Asn Pro Ala Cys Thr
Gly Cys
(SEQ ID NO: 1089
Cys Cys Trp Leu Cys Cys Asn Pro Ala Cys Thr
Gly Cys
(SEQ ID NO: 1090
Cys Cys Gly Leu Cys Cys Asn Pro Ala Cys Thr
Gly Cys
(SEQ ID NO: 1091
Cys Cys Ser Leu Cys Cys Asn Pro Ala Cys Thr
Gly Cys
(SEQ ID NO: 1092
Cys Cys Thr Leu Cys Cys Asn Pro Ala Cys Thr
Gly Cys
(SEQ ID NO: 1093
Cys Cys Cys Leu Cys Cys Asn Pro Ala Cys Thr
Gly Cys
(SEQ ID NO: 1094
Cys Cys Asn Leu Cys Cys Asn Pro Ala Cys Thr
Gly Cys
(SEQ ID NO: 1095
Cys Cys Gln Leu Cys Cys Asn Pro Ala Cys Thr
Gly Cys
(SEQ ID NO: 1096
Cys Cys Tyr Leu Cys Cys Asn Pro Ala Cys Thr
Gly Cys
(SEQ ID NO: 1097
Cys Cys Asp Leu Cys Cys Asn Pro Ala Cys Thr
Gly Cys
(SEQ ID NO: 1098
Cys Cys Lys Leu Cys Cys Asn Pro Ala Cys Thr
Gly Cys
(SEQ ID NO: 1099
Cys Cys Arg Leu Cys Cys Asn Pro Ala Cys Thr
Gly Cys
(SEQ ID NO: 1100
Cys Cys His Leu Cys Cys Asn Pro Ala Cys Thr
Gly Cys
(SEQ ID NO: 1101
Cys Cys Ala Tyr Cys Cys Asn Pro Ala Cys Thr
Gly Cys Tyr
(SEQ ID NO: 1102
Cys Cys Val Tyr Cys Cys Asn Pro Ala Cys Thr
Gly Cys Tyr
(SEQ ID NO: 1103
Cys Cys Leu Tyr Cys Cys Asn Pro Ala Cys Thr
Gly Cys Tyr
(SEQ ID NO: 1104
Cys Cys Ile Tyr Cys Cys Asn Pro Ala Cys Thr
Gly Cys Tyr
(SEQ ID NO: 1105
Cys Cys Met Tyr Cys Cys Asn Pro Ala Cys Thr
Gly Cys Tyr
(SEQ ID NO: 1106
Cys Cys Phe Tyr Cys Cys Asn Pro Ala Cys Thr
Gly Cys Tyr
(SEQ ID NO: 1107
Cys Cys Trp Tyr Cys Cys Asn Pro Ala Cys Thr
Gly Cys Tyr
(SEQ ID NO: 1108
Cys Cys Gly Tyr Cys Cys Asn Pro Ala Cys Thr
Gly Cys Tyr
(SEQ ID NO: 1109
Cys Cys Ser Tyr Cys Cys Asn Pro Ala Cys Thr
Gly Cys Tyr
(SEQ ID NO: 1110
Cys Cys Thr Tyr Cys Cys Asn Pro Ala Cys Thr
Gly Cys Tyr
(SEQ ID NO: 1111
Cys Cys Cys Tyr Cys Cys Asn Pro Ala Cys Thr
Gly Cys Tyr
(SEQ ID NO: 1112
Cys Cys Asn Tyr Cys Cys Asn Pro Ala Cys Thr
Gly Cys Tyr
(SEQ ID NO: 1113
Cys Cys Gln Tyr Cys Cys Asn Pro Ala Cys Thr
Gly Cys Tyr
(SEQ ID NO: 1114
Cys Cys Tyr Tyr Cys Cys Asn Pro Ala Cys Thr
Gly Cys Tyr
(SEQ ID NO: 1115
Cys Cys Asp Tyr Cys Cys Asn Pro Ala Cys Thr
Gly Cys Tyr
(SEQ ID NO: 1116
Cys Cys Lys Tyr Cys Cys Asn Pro Ala Cys Thr
Gly Cys Tyr
(SEQ ID NO: 1117
Cys Cys Arg Tyr Cys Cys Asn Pro Ala Cys Thr
Gly Cys Tyr
(SEQ ID NO: 1118
Cys Cys His Tyr Cys Cys Asn Pro Ala Cys Thr
Gly Cys Tyr
(SEQ ID NO: 1119
Cys Cys Ala Tyr Cys Cys Asn Pro Ala Cys Thr
Gly Cys
(SEQ ID NO: 1120
Cys Cys Val Tyr Cys Cys Asn Pro Ala Cys Thr
Gly Cys
(SEQ ID NO: 1121
Cys Cys Leu Tyr Cys Cys Asn Pro Ala Cys Thr
Gly Cys
(SEQ ID NO: 1122
Cys Cys Ile Tyr Cys Cys Asn Pro Ala Cys Thr
Gly Cys
(SEQ ID NO: 1123
Cys Cys Met Tyr Cys Cys Asn Pro Ala Cys Thr
Gly Cys
(SEQ ID NO: 1124
Cys Cys Phe Tyr Cys Cys Asn Pro Ala Cys Thr
Gly Cys
(SEQ ID NO: 1125
Cys Cys Trp Tyr Cys Cys Asn Pro Ala Cys Thr
Gly Cys
(SEQ ID NO: 1126
Cys Cys Gly Tyr Cys Cys Asn Pro Ala Cys Thr
Gly Cys
(SEQ ID NO: 1127
Cys Cys Ser Tyr Cys Cys Asn Pro Ala Cys Thr
Gly Cys
(SEQ ID NO: 1128
Cys Cys Thr Tyr Cys Cys Asn Pro Ala Cys Thr
Gly Cys
(SEQ ID NO: 1129
Cys Cys Cys Tyr Cys Cys Asn Pro Ala Cys Thr
Gly Cys
(SEQ ID NO: 1130
Cys Cys Asn Tyr Cys Cys Asn Pro Ala Cys Thr
Gly Cys
(SEQ ID NO: 1131
Cys Cys Gln Tyr Cys Cys Asn Pro Ala Cys Thr
Gly Cys
(SEQ ID NO: 1132
Cys Cys Tyr Tyr Cys Cys Asn Pro Ala Cys Thr
Gly Cys
(SEQ ID NO: 1133
Cys Cys Asp Tyr Cys Cys Asn Pro Ala Cys Thr
Gly Cys
(SEQ ID NO: 1134
Cys Cys Lys Tyr Cys Cys Asn Pro Ala Cys Thr
Gly Cys
(SEQ ID NO: 1135
Cys Cys Arg Tyr Cys Cys Asn Pro Ala Cys Thr
Gly Cys
(SEQ ID NO: 1136
Cys Cys His Tyr Cys Cys Asn Pro Ala Cys Thr
Gly Cys
(SEQ ID NO: 1137
Cys Cys Glu Phe Cys Cys Ala Pro Ala Cys Thr
Gly Cys Tyr
(SEQ ID NO: 1138
Cys Cys Glu Phe Cys Cys Val Pro Ala Cys Thr
Gly Cys Tyr
(SEQ ID NO: 1139
Cys Cys Glu Phe Cys Cys Leu Pro Ala Cys Thr
Gly Cys Tyr
(SEQ ID NO: 1140
Cys Cys Glu Phe Cys Cys Ile Pro Ala Cys Thr
Gly Cys Tyr
(SEQ ID NO: 1141
Cys Cys Glu Phe Cys Cys Pro Pro Ala Cys Thr
Gly Cys Tyr
(SEQ ID NO: 1142
Cys Cys Glu Phe Cys Cys Met Pro Ala Cys Thr
Gly Cys Tyr
(SEQ ID NO: 1143
Cys Cys Glu Phe Cys Cys Phe Pro Ala Cys Thr
Gly Cys Tyr
(SEQ ID NO: 1144
Cys Cys Glu Phe Cys Cys Trp Pro Ala Cys Thr
Gly Cys Tyr
(SEQ ID NO: 1145
Cys Cys Glu Phe Cys Cys Gly Pro Ala Cys Thr
Gly Cys Tyr
(SEQ ID NO: 1146
Cys Cys Glu Phe Cys Cys Ser Pro Ala Cys Thr
Gly Cys Tyr
(SEQ ID NO: 1147
Cys Cys Glu Phe Cys Cys Thr Pro Ala Cys Thr
Gly Cys Tyr
(SEQ ID NO: 1148
Cys Cys Glu Phe Cys Cys Cys Pro Ala Cys Thr
Gly Cys Tyr
(SEQ ID NO: 1149
Cys Cys Glu Phe Cys Cys Gln Pro Ala Cys Thr
Gly Cys Tyr
(SEQ ID NO: 1150
Cys Cys Glu Phe Cys Cys Tyr Pro Ala Cys Thr
Gly Cys Tyr
(SEQ ID NO: 1151
Cys Cys Glu Phe Cys Cys Asp Pro Ala Cys Thr
Gly Cys Tyr
(SEQ ID NO: 1152
Cys Cys Glu Phe Cys Cys Glu Pro Ala Cys Thr
Gly Cys Tyr
(SEQ ID NO: 1153
Cys Cys Glu Phe Cys Cys Lys Pro Ala Cys Thr
Gly Cys Tyr
(SEQ ID NO: 1154
Cys Cys Glu Phe Cys Cys Arg Pro Ala Cys Thr
Gly Cys Tyr
(SEQ ID NO: 1155
Cys Cys Glu Phe Cys Cys His Pro Ala Cys Thr
Gly Cys Tyr
(SEQ ID NO: 1156
Cys Cys Glu Phe Cys Cys Ala Pro Ala Cys Thr
Gly Cys
(SEQ ID NO: 1157
Cys Cys Glu Phe Cys Cys Val Pro Ala Cys Thr
Gly Cys
(SEQ ID NO: 1158
Cys Cys Glu Phe Cys Cys Leu Pro Ala Cys Thr
Gly Cys
(SEQ ID NO: 1159
Cys Cys Glu Phe Cys Cys Ile Pro Ala Cys Thr
Gly Cys
(SEQ ID NO: 1160
Cys Cys Glu Phe Cys Cys Pro Pro Ala Cys Thr
Gly Cys
(SEQ ID NO: 1161
Cys Cys Glu Phe Cys Cys Met Pro Ala Cys Thr
Gly Cys
(SEQ ID NO: 1162
Cys Cys Glu Phe Cys Cys Phe Pro Ala Cys Thr
Gly Cys
(SEQ ID NO: 1163
Cys Cys Glu Phe Cys Cys Trp Pro Ala Cys Thr
Gly Cys
(SEQ ID NO: 1164
Cys Cys Glu Phe Cys Cys Gly Pro Ala Cys Thr
Gly Cys
(SEQ ID NO: 1165
Cys Cys Glu Phe Cys Cys Ser Pro Ala Cys Thr
Gly Cys
(SEQ ID NO: 1166
Cys Cys Glu Phe Cys Cys Thr Pro Ala Cys Thr
Gly Cys
(SEQ ID NO: 1167
Cys Cys Glu Phe Cys Cys Cys Pro Ala Cys Thr
Gly Cys
(SEQ ID NO: 1168
Cys Cys Glu Phe Cys Cys Gln Pro Ala Cys Thr
Gly Cys
(SEQ ID NO: 1169
Cys Cys Glu Phe Cys Cys Tyr Pro Ala Cys Thr
Gly Cys
(SEQ ID NO: 1170
Cys Cys Glu Phe Cys Cys Asp Pro Ala Cys Thr
Gly Cys
(SEQ ID NO: 1171
Cys Cys Glu Phe Cys Cys Glu Pro Ala Cys Thr
Gly Cys
(SEQ ID NO: 1172
Cys Cys Glu Phe Cys Cys Lys Pro Ala Cys Thr
Gly Cys
(SEQ ID NO: 1173
Cys Cys Glu Phe Cys Cys Arg Pro Ala Cys Thr
Gly Cys
(SEQ ID NO: 1174
Cys Cys Glu Phe Cys Cys His Pro Ala Cys Thr
Gly Cys
(SEQ ID NO: 1175
Cys Cys Glu Trp Cys Cys Ala Pro Ala Cys Thr
Gly Cys Tyr
(SEQ ID NO: 1176
Cys Cys Glu Trp Cys Cys Val Pro Ala Cys Thr
Gly Cys Tyr
(SEQ ID NO: 1177
Cys Cys Glu Trp Cys Cys Leu Pro Ala Cys Thr
Gly Cys Tyr
(SEQ ID NO: 1178
Cys Cys Glu Trp Cys Cys Ile Pro Ala Cys Thr
Gly Cys Tyr
(SEQ ID NO: 1179
Cys Cys Glu Trp Cys Cys Pro Pro Ala Cys Thr
Gly Cys Tyr
(SEQ ID NO: 1180
Cys Cys Glu Trp Cys Cys Met Pro Ala Cys Thr
Gly Cys Tyr
(SEQ ID NO: 1181
Cys Cys Glu Trp Cys Cys Phe Pro Ala Cys Thr
Gly Cys Tyr
(SEQ ID NO: 1182
Cys Cys Glu Trp Cys Cys Trp Pro Ala Cys Thr
Gly Cys Tyr
(SEQ ID NO: 1183
Cys Cys Glu Trp Cys Cys Gly Pro Ala Cys Thr
Gly Cys Tyr
(SEQ ID NO: 1184
Cys Cys Glu Trp Cys Cys Ser Pro Ala Cys Thr
Gly Cys Tyr
(SEQ ID NO: 1185
Cys Cys Glu Trp Cys Cys Thr Pro Ala Cys Thr
Gly Cys Tyr
(SEQ ID NO: 1186
Cys Cys Glu Trp Cys Cys Cys Pro Ala Cys Thr
Gly Cys Tyr
(SEQ ID NO: 1187
Cys Cys Glu Trp Cys Cys Gln Pro Ala Cys Thr
Gly Cys Tyr
(SEQ ID NO: 1188
Cys Cys Glu Trp Cys Cys Tyr Pro Ala Cys Thr
Gly Cys Tyr
(SEQ ID NO: 1189
Cys Cys Glu Trp Cys Cys Asp Pro Ala Cys Thr
Gly Cys Tyr
(SEQ ID NO: 1190
Cys Cys Glu Trp Cys Cys Glu Pro Ala Cys Thr
Gly Cys Tyr
(SEQ ID NO: 1191
Cys Cys Glu Trp Cys Cys Lys Pro Ala Cys Thr
Gly Cys Tyr
(SEQ ID NO: 1192
Cys Cys Glu Trp Cys Cys Arg Pro Ala Cys Thr
Gly Cys Tyr
(SEQ ID NO: 1193
Cys Cys Glu Trp Cys Cys His Pro Ala Cys Thr
Gly Cys Tyr
(SEQ ID NO: 1194
Cys Cys Glu Trp Cys Cys Ala Pro Ala Cys Thr
Gly Cys
(SEQ ID NO: 1195
Cys Cys Glu Trp Cys Cys Val Pro Ala Cys Thr
Gly Cys
(SEQ ID NO: 1196
Cys Cys Glu Trp Cys Cys Leu Pro Ala Cys Thr
Gly Cys
(SEQ ID NO: 1197
Cys Cys Glu Trp Cys Cys Ile Pro Ala Cys Thr
Gly Cys
(SEQ ID NO: 1198
Cys Cys Glu Trp Cys Cys Pro Pro Ala Cys Thr
Gly Cys
(SEQ ID NO: 1199
Cys Cys Glu Trp Cys Cys Met Pro Ala Cys Thr
Gly Cys
(SEQ ID NO: 1200
Cys Cys Glu Trp Cys Cys Phe Pro Ala Cys Thr
Gly Cys
(SEQ ID NO: 1201
Cys Cys Glu Trp Cys Cys Trp Pro Ala Cys Thr
Gly Cys
(SEQ ID NO: 1202
Cys Cys Glu Trp Cys Cys Gly Pro Ala Cys Thr
Gly Cys
(SEQ ID NO: 1203
Cys Cys Glu Trp Cys Cys Ser Pro Ala Cys Thr
Gly Cys
(SEQ ID NO: 1204
Cys Cys Glu Trp Cys Cys Thr Pro Ala Cys Thr
Gly Cys
(SEQ ID NO: 1205
Cys Cys Glu Trp Cys Cys Cys Pro Ala Cys Thr
Gly Cys
(SEQ ID NO: 1206
Cys Cys Glu Trp Cys Cys Gln Pro Ala Cys Thr
Gly Cys
(SEQ ID NO: 1207
Cys Cys Glu Trp Cys Cys Tyr Pro Ala Cys Thr
Gly Cys
(SEQ ID NO: 1208
Cys Cys Glu Trp Cys Cys Asp Pro Ala Cys Thr
Gly Cys
(SEQ ID NO: 1209
Cys Cys Glu Trp Cys Cys Glu Pro Ala Cys Thr
Gly Cys
(SEQ ID NO: 1210
Cys Cys Glu Trp Cys Cys Lys Pro Ala Cys Thr
Gly Cys
(SEQ ID NO: 1211
Cys Cys Glu Trp Cys Cys Arg Pro Ala Cys Thr
Gly Cys
(SEQ ID NO: 1212
Cys Cys Glu Trp Cys Cys His Pro Ala Cys Thr
Gly Cys
(SEQ ID NO: 1213
Cys Cys Glu Trp Cys Cys Asn Pro Ala Cys Thr
Gly Cys Ala
(SEQ ID NO: 1214
Cys Cys Glu Trp Cys Cys Asn Pro Ala Cys Thr
Gly Cys Val
(SEQ ID NO: 1215
Cys Cys Glu Trp Cys Cys Asn Pro Ala Cys Thr
Gly Cys Leu
(SEQ ID NO: 1216
Cys Cys Glu Trp Cys Cys Asn Pro Ala Cys Thr
Gly Cys Ile
(SEQ ID NO: 1217
Cys Cys Glu Trp Cys Cys Asn Pro Ala Cys Thr
Gly Cys Pro
(SEQ ID NO: 1218
Cys Cys Glu Trp Cys Cys Asn Pro Ala Cys Thr
Gly Cys Met
(SEQ ID NO: 1219
Cys Cys Glu Trp Cys Cys Asn Pro Ala Cys Thr
Gly Cys Phe
(SEQ ID NO: 1220
Cys Cys Glu Trp Cys Cys Asn Pro Ala Cys Thr
Gly Cys Trp
(SEQ ID NO: 1221
Cys Cys Glu Trp Cys Cys Asn Pro Ala Cys Thr
Gly Cys Gly
(SEQ ID NO: 1222
Cys Cys Glu Trp Cys Cys Asn Pro Ala Cys Thr
Gly Cys Ser
(SEQ ID NO: 1223
Cys Cys Glu Trp Cys Cys Asn Pro Ala Cys Thr
Gly Cys Thr
(SEQ ID NO: 1224
Cys Cys Glu Trp Cys Cys Asn Pro Ala Cys Thr
Gly Cys Cys
(SEQ ID NO: 1225
Cys Cys Glu Trp Cys Cys Asn Pro Ala Cys Thr
Gly Cys Asn
(SEQ ID NO: 1226
Cys Cys Glu Trp Cys Cys Asn Pro Ala Cys Thr
Gly Cys Gln
(SEQ ID NO: 1227
Cys Cys Glu Trp Cys Cys Asn Pro Ala Cys Thr
Gly Cys Asp
(SEQ ID NO: 1228
Cys Cys Glu Trp Cys Cys Asn Pro Ala Cys Thr
Gly Cys Glu
(SEQ ID NO: 1229
Cys Cys Glu Trp Cys Cys Asn Pro Ala Cys Thr
Gly Cys Lys
(SEQ ID NO: 1230
Cys Cys Glu Trp Cys Cys Asn Pro Ala Cys Thr
Gly Cys Arg
(SEQ ID NO: 1231
Cys Cys Glu Trp Cys Cys Asn Pro Ala Cys Thr
Gly Cys His
(SEQ ID NO: 1232
Cys Cys Glu Phe Cys Cys Asn Pro Ala Cys Thr
Gly Cys Ala
(SEQ ID NO: 1233
Cys Cys Glu Phe Cys Cys Asn Pro Ala Cys Thr
Gly Cys Val
(SEQ ID NO: 1234
Cys Cys Glu Phe Cys Cys Asn Pro Ala Cys Thr
Gly Cys Leu
(SEQ ID NO: 1235
Cys Cys Glu Phe Cys Cys Asn Pro Ala Cys Thr
Gly Cys Ile
(SEQ ID NO: 1236
Cys Cys Glu Phe Cys Cys Asn Pro Ala Cys Thr
Gly Cys Pro
(SEQ ID NO: 1237
Cys Cys Glu Phe Cys Cys Asn Pro Ala Cys Thr
Gly Cys Met
(SEQ ID NO: 1238
Cys Cys Glu Phe Cys Cys Asn Pro Ala Cys Thr
Gly Cys Phe
(SEQ ID NO: 1239
Cys Cys Glu Phe Cys Cys Asn Pro Ala Cys Thr
Gly Cys Trp
(SEQ ID NO: 1240
Cys Cys Glu Phe Cys Cys Asn Pro Ala Cys Thr
Gly Cys Gly
(SEQ ID NO: 1241
Cys Cys Glu Phe Cys Cys Asn Pro Ala Cys Thr
Gly Cys Ser
(SEQ ID NO: 1242
Cys Cys Glu Phe Cys Cys Asn Pro Ala Cys Thr
Gly Cys Thr
(SEQ ID NO: 1243
Cys Cys Glu Phe Cys Cys Asn Pro Ala Cys Thr
Gly Cys Cys
(SEQ ID NO: 1244
Cys Cys Glu Phe Cys Cys Asn Pro Ala Cys Thr
Gly Cys Asn
(SEQ ID NO: 1245
Cys Cys Glu Phe Cys Cys Asn Pro Ala Cys Thr
Gly Cys Gln
(SEQ ID NO: 1246
Cys Cys Glu Phe Cys Cys Asn Pro Ala Cys Thr
Gly Cys Asp
(SEQ ID NO: 1247
Cys Cys Glu Phe Cys Cys Asn Pro Ala Cys Thr
Gly Cys Glu
(SEQ ID NO: 1248
Cys Cys Glu Phe Cys Cys Asn Pro Ala Cys Thr
Gly Cys Lys
(SEQ ID NO: 1249
Cys Cys Glu Phe Cys Cys Asn Pro Ala Cys Thr
Gly Cys Arg
(SEQ ID NO: 1250
Cys Cys Glu Phe Cys Cys Asn Pro Ala Cys Thr
Gly Cys His
(SEQ ID NO: 1251
Cys Cys Ala Phe Cys Cys Asn Pro Ala Cys Thr
Gly Cys Tyr
(SEQ ID NO: 1252
Cys Cys Val Phe Cys Cys Asn Pro Ala Cys Thr
Gly Cys Tyr
(SEQ ID NO: 1253
Cys Cys Leu Phe Cys Cys Asn Pro Ala Cys Thr
Gly Cys Tyr
(SEQ ID NO: 1254
Cys Cys Ile Phe Cys Cys Asn Pro Ala Cys Thr
Gly Cys Tyr
(SEQ ID NO: 1255
Cys Cys Met Phe Cys Cys Asn Pro Ala Cys Thr
Gly Cys Tyr
(SEQ ID NO: 1256
Cys Cys Phe Phe Cys Cys Asn Pro Ala Cys Thr
Gly Cys Tyr
(SEQ ID NO: 1257
Cys Cys Trp Phe Cys Cys Asn Pro Ala Cys Thr
Gly Cys Tyr
(SEQ ID NO: 1258
Cys Cys Gly Phe Cys Cys Asn Pro Ala Cys Thr
Gly Cys Tyr
(SEQ ID NO: 1259
Cys Cys Ser Phe Cys Cys Asn Pro Ala Cys Thr
Gly Cys Tyr
(SEQ ID NO: 1260
Cys Cys Thr Phe Cys Cys Asn Pro Ala Cys Thr
Gly Cys Tyr
(SEQ ID NO: 1261
Cys Cys Cys Phe Cys Cys Asn Pro Ala Cys Thr
Gly Cys Tyr
(SEQ ID NO: 1262
Cys Cys Asn Phe Cys Cys Asn Pro Ala Cys Thr
Gly Cys Tyr
(SEQ ID NO: 1263
Cys Cys Gln Phe Cys Cys Asn Pro Ala Cys Thr
Gly Cys Tyr
(SEQ ID NO: 1264
Cys Cys Tyr Phe Cys Cys Asn Pro Ala Cys Thr
Gly Cys Tyr
(SEQ ID NO: 1265
Cys Cys Asp Phe Cys Cys Asn Pro Ala Cys Thr
Gly Cys Tyr
(SEQ ID NO: 1266
Cys Cys Lys Phe Cys Cys Asn Pro Ala Cys Thr
Gly Cys Tyr
(SEQ ID NO: 1267
Cys Cys Arg Phe Cys Cys Asn Pro Ala Cys Thr
Gly Cys Tyr
(SEQ ID NO: 1268
Cys Cys His Phe Cys Cys Asn Pro Ala Cys Thr
Gly Cys Tyr
(SEQ ID NO: 1269
Cys Cys Ala Phe Cys Cys Asn Pro Ala Cys Thr
Gly Cys
(SEQ ID NO: 1270
Cys Cys Val Phe Cys Cys Asn Pro Ala Cys Thr
Gly Cys
(SEQ ID NO: 1271
Cys Cys Leu Phe Cys Cys Asn Pro Ala Cys Thr
Gly Cys
(SEQ ID NO: 1272
Cys Cys Ile Phe Cys Cys Asn Pro Ala Cys Thr
Gly Cys
(SEQ ID NO: 1273
Cys Cys Met Phe Cys Cys Asn Pro Ala Cys Thr
Gly Cys
(SEQ ID NO: 1274
Cys Cys Phe Phe Cys Cys Asn Pro Ala Cys Thr
Gly Cys
(SEQ ID NO: 1275
Cys Cys Trp Phe Cys Cys Asn Pro Ala Cys
Thr Gly Cys
(SEQ ID NO: 1276
Cys Cys Gly Phe Cys Cys Asn Pro Ala Cys Thr
Gly Cys
(SEQ ID NO: 1277
Cys Cys Ser Phe Cys Cys Asn Pro Ala Cys Thr
Gly Cys
(SEQ ID NO: 1278
Cys Cys Thr Phe Cys Cys Asn Pro Ala Cys Thr
Gly Cys
(SEQ ID NO: 1279
Cys Cys Cys Phe Cys Cys Asn Pro Ala Cys Thr
Gly Cys
(SEQ ID NO: 1280
Cys Cys Asn Phe Cys Cys Asn Pro Ala Cys Thr
Gly Cys
(SEQ ID NO: 1281
Cys Cys Gln Phe Cys Cys Asn Pro Ala Cys Thr
Gly Cys
(SEQ ID NO: 1282
Cys Cys Tyr Phe Cys Cys Asn Pro Ala Cys Thr
Gly Cys
(SEQ ID NO: 1283
Cys Cys Asp Phe Cys Cys Asn Pro Ala Cys Thr
Gly Cys
(SEQ ID NO: 1284
Cys Cys Lys Phe Cys Cys Asn Pro Ala Cys Thr
Gly Cys
(SEQ ID NO: 1285
Cys Cys Arg Phe Cys Cys Asn Pro Ala Cys Thr
Gly Cys
(SEQ ID NO: 1286
Cys Cys His Phe Cys Cys Asn Pro Ala Cys Thr
Gly Cys
(SEQ ID NO: 1287
Cys Cys Ala Trp Cys Cys Asn Pro Ala Cys Thr
Gly Cys Tyr
(SEQ ID NO: 1288
Cys Cys Val Trp Cys Cys Asn Pro Ala Cys Thr
Gly Cys Tyr
(SEQ ID NO: 1289
Cys Cys Leu Trp Cys Cys Asn Pro Ala Cys Thr
Gly Cys Tyr
(SEQ ID NO: 1290
Cys Cys Ile Trp Cys Cys Asn Pro Ala Cys Thr
Gly Cys Tyr
(SEQ ID NO: 1291
Cys Cys Met Trp Cys Cys Asn Pro Ala Cys Thr
Gly Cys Tyr
(SEQ ID NO: 1292
Cys Cys Phe Trp Cys Cys Asn Pro Ala Cys Thr
Gly Cys Tyr
(SEQ ID NO: 1293
Cys Cys Trp Trp Cys Cys Asn Pro Ala Cys Thr
Gly Cys Tyr
(SEQ ID NO: 1294
Cys Cys Gly Trp Cys Cys Asn Pro Ala Cys Thr
Gly Cys Tyr
(SEQ ID NO: 1295
Cys Cys Ser Trp Cys Cys Asn Pro Ala Cys Thr
Gly Cys Tyr
(SEQ ID NO: 1296
Cys Cys Thr Trp Cys Cys Asn Pro Ala Cys Thr
Gly Cys Tyr
(SEQ ID NO: 1297
Cys Cys Cys Trp Cys Cys Asn Pro Ala Cys Thr
Gly Cys Tyr
(SEQ ID NO: 1298
Cys Cys Asn Trp Cys Cys Asn Pro Ala Cys Thr
Gly Cys Tyr
(SEQ ID NO: 1299
Cys Cys Gln Trp Cys Cys Asn Pro Ala Cys Thr
Gly Cys Tyr
(SEQ ID NO: 1300
Cys Cys Tyr Trp Cys Cys Asn Pro Ala Cys Thr
Gly Cys Tyr
(SEQ ID NO: 1301
Cys Cys Asp Trp Cys Cys Asn Pro Ala Cys Thr
Gly Cys Tyr
(SEQ ID NO: 1302
Cys Cys Lys Trp Cys Cys Asn Pro Ala Cys Thr
Gly Cys Tyr
(SEQ ID NO: 1303
Cys Cys Arg Trp Cys Cys Asn Pro Ala Cys Thr
Gly Cys Tyr
(SEQ ID NO: 1304
Cys Cys His Trp Cys Cys Asn Pro Ala Cys Thr
Gly Cys Tyr
(SEQ ID NO: 1305
Cys Cys Ala Trp Cys Cys Asn Pro Ala Cys Thr
Gly Cys
(SEQ ID NO: 1306
Cys Cys Val Trp Cys Cys Asn Pro Ala Cys Thr
Gly Cys
(SEQ ID NO: 1307
Cys Cys Leu Trp Cys Cys Asn Pro Ala Cys Thr
Gly Cys
(SEQ ID NO: 1308
Cys Cys Ile Trp Cys Cys Asn Pro Ala Cys Thr
Gly Cys
(SEQ ID NO: 1309
Cys Cys Met Trp Cys Cys Asn Pro Ala Cys Thr
Gly Cys
(SEQ ID NO: 1310
Cys Cys Phe Trp Cys Cys Asn Pro Ala Cys Thr
Gly Cys
(SEQ ID NO: 1311
Cys Cys Trp Trp Cys Cys Asn Pro Ala Cys Thr
Gly Cys
(SEQ ID NO: 1312
Cys Cys Gly Trp Cys Cys Asn Pro Ala Cys Thr
Gly Cys
(SEQ ID NO: 1313
Cys Cys Ser Trp Cys Cys Asn Pro Ala Cys Thr
Gly Cys
(SEQ ID NO: 1314
Cys Cys Thr Trp Cys Cys Asn Pro Ala Cys Thr
Gly Cys
(SEQ ID NO: 1315
Cys Cys Cys Trp Cys Cys Asn Pro Ala Cys Thr
Gly Cys
(SEQ ID NO: 1316
Cys Cys Asn Trp Cys Cys Asn Pro Ala Cys Thr
Gly Cys
(SEQ ID NO: 1317
Cys Cys Gln Trp Cys Cys Asn Pro Ala Cys Thr
Gly Cys
(SEQ ID NO: 1318
Cys Cys Tyr Trp Cys Cys Asn Pro Ala Cys Thr
Gly Cys
(SEQ ID NO: 1319
Cys Cys Asp Trp Cys Cys Asn Pro Ala Cys Thr
Gly Cys
(SEQ ID NO: 1320
Cys Cys Lys Trp Cys Cys Asn Pro Ala Cys Thr
Gly Cys
(SEQ ID NO: 1321
Cys Cys Arg Trp Cys Cys Asn Pro Ala Cys Thr
Gly Cys;
and
(SEQ ID NO: 1322
Cys Cys His Trp Cys Cys Asn Pro Ala Cys Thr
Gly Cys

[0343] Additional useful peptides include peptides wherein D′ comprises, consists of, or consists essentially of the amino acid sequence (SEQ ID NOs:1423-1550, respectively, as shown below):

(SEQ ID NO: 1423
Cys Glu Leu Cys Ile Asn Val Ala Cys Thr Gly Cys
(SEQ ID NO: 1424
Cys Glu Leu Cys Val Asn Val Ala Cys Thr Gly Cys
(SEQ ID NO: 1425
Cys Ala Glu Leu Cys Cys Asn Pro Ala Cys
(SEQ ID NO: 1426
Cys Cys Gly Leu Cys Cys Asn Pro Ala Cys Ala Gly Cys
(SEQ ID NO: 1427
Cys Cys Gly Leu Cys Cys Tyr Pro Ala Cys Ala Gly Cys
(SEQ ID NO: 1428
Cys Glu Leu Cys Cys Asn Pro Ala Cys Ala Gly Cys
(SEQ ID NO: 1429
Cys Cys Asp Val Cys Cys Tyr Pro Ala Cys Thr Gly Cys
(SEQ ID NO: 1430
Cys Cys Glu Leu Cys Cys Asn Pro Ala Cys Ala Gly Cys
(SEQ ID NO: 1431
Cys Cys Glu Leu Cys Cys Tyr Pro Ala Cys Ala Gly Cys
(SEQ ID NO: 1432
Cys Cys Glu Leu Cys Cys Asn Pro Ala Cys Thr Gly Cys
(SEQ ID NO: 1433
Cys Cys Glu Leu Cys Cys Tyr Pro Ala Cys Thr Gly Cys
(SEQ ID NO: 1434
Cys Cys Glu Leu Cys Cys Asn Pro Gly Cys Thr Gly Cys
(SEQ ID NO: 1435
Cys Cys Glu Ala Cys Cys Asn Pro Ala Cys Thr Gly Cys
(SEQ ID NO: 1436
Cys Cys Glu Lys Cys Cys Asn Pro Ala Cys Thr Gly Cys
(SEQ ID NO: 1437
Cys Cys Glu Leu Cys Cys Asn Pro Ala Cys Thr Ala Cys
(SEQ ID NO: 1438
Cys Cys Pro Leu Cys Cys Asn Pro Ala Cys Thr Gly Cys
(SEQ ID NO: 1439
Ala Cys Glu Leu Cys Ala Asn Pro Ala Cys Thr Gly Cys
(SEQ ID NO: 1440
Cys Cys Glu Leu Ala Cys Asn Pro Ala Cys Thr Gly Ala
(SEQ ID NO: 1441
Cys Glu Leu Cys Ala Asn Pro Ala Cys Thr Gly Cys
(SEQ ID NO: 1442
Cys Cys Glu Leu Ala Cys Asn Pro Ala Cys
(SEQ ID NO: 1443
Cys Cys Asp Val Cys Cys Asn Pro Ala Cys Ala Gly Cys
(SEQ ID NO: 1444
Cys Cys Asp Val Cys Cys Asn Pro Ala Cys Thr Gly Cys
(SEQ ID NO: 1445
Cys Cys Asp Val Cys Cys Asn Pro Ala Cys Ala Gly Cys
Tyr
(SEQ ID NO: 1446
Cys Cys Asp Val Cys Cys Asn Pro Ala Cys Thr Gly Cys
Tyr
(SEQ ID NO: 1447
Cys Cys Glu Leu Cys Cys Tyr Pro Ala Cys Ala Gly Cys
(SEQ ID NO: 1448
Cys Cys Ile Cys Cys Asn Pro Ala Cys Phe Gly Cys
(SEQ ID NO: 1449
Cys Cys Asn Tyr Cys Cys Ser Pro Cys Gly Cys
(SEQ ID NO. 1450)
Cys Cys Asp Val Cys Cys Asn Pro Ala Cys Ala Gly Cys
(SEQ ID NO. 1451)
Cys Cys Asp Ala Cys Cys Asn Pro Ala Cys Ala Gly Cys
(SEQ ID NO. 1452)
Cys Cys Asp Cys Cys Cys Asn Pro Ala Cys Ala Gly Cys
(SEQ ID NO. 1453)
Cys Cys Asp Asp Cys Cys Asn Pro Ala Cys Ala Gly Cys
(SEQ ID NO. 1454)
Cys Cys Asp Glu Cys Cys Asn Pro Ala Cys Ala Gly Cys
(SEQ ID NO. 1455)
Cys Cys Asp Phe Cys Cys Asn Pro Ala Cys Ala Gly Cys
(SEQ ID NO. 1456)
Cys Cys Asp Gly Cys Cys Asn Pro Ala Cys Ala Gly Cys
(SEQ ID NO. 1457)
Cys Cys Asp His Cys Cys Asn Pro Ala Cys Ala Gly Cys
(SEQ ID NO. 1458)
Cys Cys Asp Ile Cys Cys Asn Pro Ala Cys Ala Gly Cys
(SEQ ID NO. 1459)
Cys Cys Asp Lys Cys Cys Asn Pro Ala Cys Ala Gly Cys
(SEQ ID NO. 1460)
Cys Cys Asp Leu Cys Cys Asn Pro Ala Cys Ala Gly Cys
(SEQ ID NO. 1461)
Cys Cys Asp Met Cys Cys Asn Pro Ala Cys Ala Gly Cys
(SEQ ID NO. 1462)
Cys Cys Asp Asn Cys Cys Asn Pro Ala Cys Ala Gly Cys
(SEQ ID NO. 1463)
Cys Cys Asp Pro Cys Cys Asn Pro Ala Cys Ala Gly Cys
(SEQ ID NO. 1464)
Cys Cys Asp Gln Cys Cys Asn Pro Ala Cys Ala Gly Cys
(SEQ ID NO. 1465)
Cys Cys Asp Arg Cys Cys Asn Pro Ala Cys Ala Gly Cys
(SEQ ID NO. 1466)
Cys Cys Asp Ser Cys Cys Asn Pro Ala Cys Ala Gly Cys
(SEQ ID NO. 1467)
Cys Cys Asp Thr Cys Cys Asn Pro Ala Cys Ala Gly Cys
(SEQ ID NO. 1468)
Cys Cys Asp Trp Cys Cys Asn Pro Ala Cys Ala Gly Cys
(SEQ ID NO. 1469)
Cys Cys Asp Tyr Cys Cys Asn Pro Ala Cys Ala Gly Cys
(SEQ ID NO. 1470)
Cys Cys Glu Ile Cys Cys Asn Pro Ala Cys Phe Gly Cys
(SEQ ID NO. 1471)
Cys Cys Glu Ala Cys Cys Asn Pro Ala Cys Phe Gly Cys
(SEQ ID NO. 1472)
Cys Cys Glu Cys Cys Cys Asn Pro Ala Cys Phe Gly Cys
(SEQ ID NO. 1473)
Cys Cys Glu Asp Cys Cys Asn Pro Ala Cys Phe Gly Cys
(SEQ ID NO. 1474)
Cys Cys Glu Glu Cys Cys Asn Pro Ala Cys Phe Gly Cys
(SEQ ID NO. 1475)
Cys Cys Glu Phe Cys Cys Asn Pro Ala Cys Phe Gly Cys
(SEQ ID NO. 1476)
Cys Cys Glu Gly Cys Cys Asn Pro Ala Cys Phe Gly Cys
(SEQ ID NO. 1477)
Cys Cys Glu His Cys Cys Asn Pro Ala Cys Phe Gly Cys
(SEQ ID NO. 1478)
Cys Cys Glu Lys Cys Cys Asn Pro Ala Cys Phe Gly Cys
(SEQ ID NO. 1479)
Cys Cys Glu Leu Cys Cys Asn Pro Ala Cys Phe Gly Cys
(SEQ ID NO. 1480)
Cys Cys Glu Met Cys Cys Asn Pro Ala Cys Phe Gly Cys
(SEQ ID NO. 1481)
Cys Cys Glu Asn Cys Cys Asn Pro Ala Cys Phe Gly Cys
(SEQ ID NO. 1482)
Cys Cys Glu Pro Cys Cys Asn Pro Ala Cys Phe Gly Cys
(SEQ ID NO. 1483)
Cys Cys Glu Gln Cys Cys Asn Pro Ala Cys Phe Gly Cys
(SEQ ID NO. 1484)
Cys Cys Glu Arg Cys Cys Asn Pro Ala Cys Phe Gly Cys
(SEQ ID NO. 1485)
Cys Cys Glu Ser Cys Cys Asn Pro Ala Cys Phe Gly Cys
(SEQ ID NO. 1486)
Cys Cys Glu Thr Cys Cys Asn Pro Ala Cys Phe Gly Cys
(SEQ ID NO. 1487)
Cys Cys Glu Val Cys Cys Asn Pro Ala Cys Phe Gly Cys
(SEQ ID NO. 1488)
Cys Cys Glu Trp Cys Cys Asn Pro Ala Cys Phe Gly Cys
(SEQ ID NO. 1489)
Cys Cys Glu Tyr Cys Cys Asn Pro Ala Cys Phe Gly Cys
(SEQ ID NO. 1490)
Cys Cys Glu Leu Cys Cys Asn Pro Ala Cys Ala Pro Cys
(SEQ ID NO. 1491)
Cys Cys Glu Ala Cys Cys Asn Pro Ala Cys Ala Pro Cys
(SEQ ID NO. 1492)
Cys Cys Glu Cys Cys Cys Asn Pro Ala Cys Ala Pro Cys
(SEQ ID NO. 1493)
Cys Cys Glu Asp Cys Cys Asn Pro Ala Cys Ala Pro Cys
(SEQ ID NO. 1494)
Cys Cys Glu Glu Cys Cys Asn Pro Ala Cys Ala Pro Cys
(SEQ ID NO. 1495)
Cys Cys Glu Phe Cys Cys Asn Pro Ala Cys Ala Pro Cys
(SEQ ID NO. 1496)
Cys Cys Glu Gly Cys Cys Asn Pro Ala Cys Ala Pro Cys
(SEQ ID NO. 1497)
Cys Cys Glu His Cys Cys Asn Pro Ala Cys Ala Pro Cys
(SEQ ID NO. 1498)
Cys Cys Glu Ile Cys Cys Asn Pro Ala Cys Ala Pro Cys
(SEQ ID NO. 1499)
Cys Cys Glu Lys Cys Cys Asn Pro Ala Cys Ala Pro Cys
(SEQ ID NO. 1500)
Cys Cys Glu Met Cys Cys Asn Pro Ala Cys Ala Pro Cys
(SEQ ID NO. 1501)
Cys Cys Glu Asn Cys Cys Asn Pro Ala Cys Ala Pro Cys
(SEQ ID NO. 1502)
Cys Cys Glu Pro Cys Cys Asn Pro Ala Cys Ala Pro Cys
(SEQ ID NO. 1503)
Cys Cys Glu Gln Cys Cys Asn Pro Ala Cys Ala Pro Cys
(SEQ ID NO. 1504)
Cys Cys Glu Arg Cys Cys Asn Pro Ala Cys Ala Pro Cys
(SEQ ID NO. 1505)
Cys Cys Glu Ser Cys Cys Asn Pro Ala Cys Ala Pro Cys
(SEQ ID NO. 1506)
Cys Cys Glu Thr Cys Cys Asn Pro Ala Cys Ala Pro Cys
(SEQ ID NO. 1507)
Cys Cys Glu Val Cys Cys Asn Pro Ala Cys Ala Pro Cys
(SEQ ID NO. 1508)
Cys Cys Glu Trp Cys Cys Asn Pro Ala Cys Ala Pro Cys
(SEQ ID NO. 1509)
Cys Cys Glu Tyr Cys Cys Asn Pro Ala Cys Ala Pro Cys
(SEQ ID NO. 1510)
Cys Cys Glu Leu Cys Cys Asn Pro Ala Cys Phe Gly Cys
(SEQ ID NO. 1511)
Cys Cys Glu Ala Cys Cys Asn Pro Ala Cys Phe Gly Cys
(SEQ ID NO. 1512)
Cys Cys Glu Cys Cys Cys Asn Pro Ala Cys Phe Gly Cys
(SEQ ID NO. 1513)
Cys Cys Glu Asp Cys Cys Asn Pro Ala Cys Phe Gly Cys
(SEQ ID NO. 1514)
Cys Cys Glu Glu Cys Cys Asn Pro Ala Cys Phe Gly Cys
(SEQ ID NO. 1515)
Cys Cys Glu Phe Cys Cys Asn Pro Ala Cys Phe Gly Cys
(SEQ ID NO. 1516)
Cys Cys Glu Gly Cys Cys Asn Pro Ala Cys Phe Gly Cys
(SEQ ID NO. 1517)
Cys Cys Glu His Cys Cys Asn Pro Ala Cys Phe Gly Cys
(SEQ ID NO. 1518)
Cys Cys Glu Ile Cys Cys Asn Pro Ala Cys Phe Gly Cys
(SEQ ID NO. 1519)
Cys Cys Glu Lys Cys Cys Asn Pro Ala Cys Phe Gly Cys
(SEQ ID NO. 1520)
Cys Cys Glu Met Cys Cys Asn Pro Ala Cys Phe Gly Cys
(SEQ ID NO. 1521)
Cys Cys Glu Asn Cys Cys Asn Pro Ala Cys Phe Gly Cys
(SEQ ID NO. 1522)
Cys Cys Glu Pro Cys Cys Asn Pro Ala Cys Phe Gly Cys
(SEQ ID NO. 1523)
Cys Cys Glu Gln Cys Cys Asn Pro Ala Cys Phe Gly Cys
(SEQ ID NO. 1524)
Cys Cys Glu Arg Cys Cys Asn Pro Ala Cys Phe Gly Cys
(SEQ ID NO. 1525)
Cys Cys Glu Ser Cys Cys Asn Pro Ala Cys Phe Gly Cys
(SEQ ID NO. 1526)
Cys Cys Glu Thr Cys Cys Asn Pro Ala Cys Phe Gly Cys
(SEQ ID NO. 1527)
Cys Cys Glu Val Cys Cys Asn Pro Ala Cys Phe Gly Cys
(SEQ ID NO. 1528)
Cys Cys Glu Trp Cys Cys Asn Pro Ala Cys Phe Gly Cys
(SEQ ID NO. 1529)
Cys Cys Glu Tyr Cys Cys Asn Pro Ala Cys Phe Gly Cys
(SEQ ID NO. 1530)
Cys Cys Glu Val Cys Cys Asn Pro Ala Cys Ala Gly Cys
(SEQ ID NO. 1531)
Cys Cys Glu Ala Cys Cys Asn Pro Ala Cys Ala Gly Cys
(SEQ ID NO. 1532)
Cys Cys Glu Cys Cys Cys Asn Pro Ala Cys Ala Gly Cys
(SEQ ID NO. 1533)
Cys Cys Glu Asp Cys Cys Asn Pro Ala Cys Ala Gly Cys
(SEQ ID NO. 1534)
Cys Cys Glu Glu Cys Cys Asn Pro Ala Cys Ala Gly Cys
(SEQ ID NO. 1535)
Cys Cys Glu Phe Cys Cys Asn Pro Ala Cys Ala Gly Cys
(SEQ ID NO. 1536)
Cys Cys Glu Gly Cys Cys Asn Pro Ala Cys Ala Gly Cys
(SEQ ID NO. 1537)
Cys Cys Glu His Cys Cys Asn Pro Ala Cys Ala Gly Cys
(SEQ ID NO. 1538)
Cys Cys Glu Ile Cys Cys Asn Pro Ala Cys Ala Gly Cys
(SEQ ID NO. 1539)
Cys Cys Glu Lys Cys Cys Asn Pro Ala Cys Ala Gly Cys
(SEQ ID NO. 1540)
Cys Cys Glu Leu Cys Cys Asn Pro Ala Cys Ala Gly Cys
(SEQ ID NO. 1541)
Cys Cys Glu Met Cys Cys Asn Pro Ala Cys Ala Gly Cys
(SEQ ID NO. 1542)
Cys Cys Glu Asn Cys Cys Asn Pro Ala Cys Ala Gly Cys
(SEQ ID NO. 1543)
Cys Cys Glu Pro Cys Cys Asn Pro Ala Cys Ala Gly Cys
(SEQ ID NO. 1544)
Cys Cys Glu Gln Cys Cys Asn Pro Ala Cys Ala Gly Cys
(SEQ ID NO. 1545)
Cys Cys Glu Arg Cys Cys Asn Pro Ala Cys Ala Gly Cys
(SEQ ID NO. 1546)
Cys Cys Glu Ser Cys Cys Asn Pro Ala Cys Ala Gly Cys
(SEQ ID NO. 1547)
Cys Cys Glu Thr Cys Cys Asn Pro Ala Cys Ala Gly Cys
(SEQ ID NO. 1548)
Cys Cys Glu Trp Cys Cys Asn Pro Ala Cys Ala Gly Cys
(SEQ ID NO. 1549)
Cys Cys Glu Tyr Cys Cys Asn Pro Ala Cys Ala Gly Cys

[0344] Also useful are the following peptides (SEQ ID NOs: 1551-1553, respectively, as shown below) wherein Xaa represents any of the 20 naturally occurring amino acids

(SEQ ID NO: 1551)
Cys Cys Xaa Xaa Cys Cys Xaa Pro Ala Cys Xaa Gly Cys
(SEQ ID NO: 1552)
Cys Cys Ile Xaa Cys Cys Asn Pro Ala Cys Phe Gly Cys
(SEQ ID NO: 1553)
Cys Cys Asn Tyr Cys Cys Ser Pro Xaa Cys Xaa Gly Cys

[0345] The disclosure also features deletion variants of any of the peptides described herein in which one, two, three or four amino acids (or non-natural amino acids or natural or non-natural amino acid analogs), other than a Cys (or an amino acid substituted for Cys, e.g, an amino acid capable of forming a covalent bond to another amino acid), are deleted. Where two (or more) amino acids are deleted and the peptide comprises the sequence: Cysₐ Cys_{b} Xaa Xaa Cys_{c} Cys_{d} Xaa Xaa Xaa Cysₑ Xaa Xaa Cys_{f}, in some cases two or more deletions can be located between Cys_{b} and Cys_{c} and/or between Cys_{d} and Cysₑ and/or between Cysₑ and Cys_{f}. However, in other cases there is at most one deletion between each of Cys_{b} and Cys_{c} or between Cys_{d} and Cysₑ or between Cysₑ and Cys_{f}. Thus, the disclosure includes any of the peptides described herein comprising the sequence Cysₐ Cys_{b} Xaa Xaa Cys_{c} Cys_{d} Xaa Xaa Xaa Cysₑ Xaa Xaa Cys_{f} wherein: a) one amino acid between Cys_{b} and Cys_{c} is deleted; b) one amino acid between Cys_{d} and Cysₑ is deleted; c) one amino acid between Cysₑ and Cys_{f} is deleted; d) one amino acid between Cys_{b} and Cys_{c} is deleted and one amino acid between Cys_{d} and Cysₑ is deleted; e) one amino acid between Cys_{d} and Cysₑ is deleted and one amino acid between Cysₑ and Cys_{f} is deleted; f) one amino acid between Cys_{b} and Cys_{c} is deleted and one amino acid between Cysₑ and Cys_{f} is deleted or g) one amino acid between Cys_{b} and Cys_{c} is deleted, one amino acid between Cys_{d} and Cysₑ is deleted and one amino acid between Cysₑ and Cys_{f} is deleted. In certain cases, the various deletion variants are peptides that bind to and/or activate the GC-C receptor. In various cases, the various deletion variants are peptides that increase cGMP levels.

[0346] Deletion variants of Cys Cys Glu Tyr Cys Cys Asn Pro Ala Cys Thr Gly Cys Tyr (SEQ ID NO:805) include the peptides listed in FIG. 13. In these deletion variants, any of the amino acids can be deleted and there can be one, two, three or four amino acids deleted other than Cys.

[0347] The disclosure also features insertion variants of any of the peptides described herein in which one, two, three or four amino acids (e.g., Gly or Ala) are inserted before or after any amino acid in the peptide. In some cases no more than one amino acid is inserted between two Cys. For example, where two or more amino acids are inserted and the peptide comprises the sequence Cysₐ Cys_{b} Xaa Xaa Cys_{c} Cys_{d} Xaa Xaa Xaa Cysₑ Xaa Xaa Cys_{f} (SEQ ID NO:1554), in some cases two or more insertions can be located between Cys_{b} and Cys_{c} or between Cys_{d} and Cysₑ or between Cysₑ and Cys_{f}. However, in other cases no more than one insertion is located between Cys_{b} and Cys_{c} or between Cys_{d} and Cysₑ or between Cysₑ and Cys_{f}. Thus, the disclosure features any of the peptides described herein comprising the sequence Cysₐ Cys_{b} Xaa Xaa Cys_{c} Cys_{d} Xaa Xaa Xaa Cysₑ Xaa Xaa Cys_{f} (SEQ ID NO:1554) wherein: a) one amino acid is inserted between Cys_{b} and Cys_{c}; b) one amino acid is inserted between Cys_{d} and Cysₑ; c) one amino acid is inserted between Cysₑ and Cys_{f}; d) one amino acid is inserted between Cys_{b} and Cys_{c} and one amino acid is inserted between Cys_{d} and Cysₑ; e) one amino acid is inserted between Cys_{d} and Cysₑ and one amino acid is inserted between Cysₑ and Cys_{f}; f) one amino acid is inserted between Cys_{b} and Cys_{c} and one amino acid is inserted between Cysₑ and Cys_{f}; or g) one amino acid is inserted between Cys_{b} and Cys_{c}, one amino acid is inserted between Cys_{d} and Cysₑ and one amino acid is inserted between Cysₑ and Cys_{f}. In addition, one or more amino acids can be inserted preceding Cysₐ and/or one or more amino acids can be inserted following Cys_{f}.

[0348] Insertion variants of Cys Cys Glu Tyr Cys Cys Asn Pro Ala Cys Thr Gly Cys Tyr (SEQ ID NO:805) include those in which up to four amino acids (i.e., 0, 1, 2, 3 or 4) can be inserted after each amino acid. Thus, the disclosure includes peptides having the sequence: Cys Xaa₍₀₋₄₎ Cys Xaa₍₀₋₄₎ Glu Xaa₍₀₋₄₎ Tyr Xaa₍₀₋₄₎ Cys Xaa₍₀₋₄₎ Cys Xaa₍₀₋₄₎ Asn Xaa₍₀₋₄₎ Pro Xaa₍₀₋₄₎ Ala Xaa₍₀₋₄₎ Cys Xaa₍₀₋₄₎ Thr Xaa₍₀₋₄₎ Gly Xaa₍₀₋₄₎ Cys Xaa₍₀₋₄₎ Tyr Xaa₍₀₋₄₎₎ (SEQ ID NO: 1555). The inserted amino acids can be any amino acid or amino acid analog (natural or non-natural) and can be the same or different. In certain cases the inserted amino acids are all Gly or all Ala or a combination of Gly and Ala.

[0349] FIG. 14 depicts insertion variants of the peptide having the sequence: Cys Cys Glu Tyr Cys Cys Asn Pro Ala Cys Thr Gly Cys Tyr (SEQ ID NO:805).

[0350] The disclosure also features variants of peptides having the sequence Xaa₁ Xaa₂ Xaa₃ Xaa₄ Xaa₅ Cys₆ Cys₇ Xaa₈ Xaa₉ Cys₁₀ Cys₁₁ Xaa₁₂ Xaa₁₃ Xaa₁₄ Cys₁₅ Xaa₁₆ Xaa₁₇ Cys₁₈ Xaa₁₉ Xaa₂₀ Xaa₂₁ (SEQ ID NO:63), e.g., variants of Cys Cys Glu Tyr Cys Cys Asn Pro Ala Cys Thr Gly Cys Tyr (SEQ ID NO:805), in which up to four amino acids are deleted and/or up to four amino acids are inserted. The insertions and deletions can be between Cys₆ and Cys₁₈ in SEQ ID NO:63 or they can be amino terminal to Cys₆ and/or carboxy terminal to Cys₁₈ in SEQ ID NO:63.

[0351] In some cases, the polypeptides described herein include polypeptides comprising (consisting essentially of or consisting of) the amino acid sequence:

(SEQ ID NO: 1556)
X₁ Cys Glu X₂ X₃ X₄ Asn Pro Ala Cys Thr Gly X₅ X₆

[0352] wherein:
[0353] X₁, X₃, X₄ and X₅ are independently selected from: Ala, Arg, Asn, Asp, Cys, Gln, Glu, Gly, His, Ile, Leu, Lys, Met, Phe, Pro, Ser, Thr, Trp, Tyr and Val;
[0354] X₂ is selected from: Ala, Arg, Asn, Asp, Cys, Gln, Glu, Gly, His, Ile, Leu, Lys, Met, Phe, Pro, Ser, Thr, Trp, Tyr and Val; and
[0355] X₆ is selected from Phe, Trp and Tyr or is missing,

[0356] provided that when both X₁ and X₄ are Ala and both X₃ and X₅ are Cys or when both X₃ and X₅ are Ala and both X₁ and X₄ are Cys or when X₁, X₃, X₄ and X₅ are all Cys, then either X₆ is selected from Phe and Trp or X₂ is not Leu.

[0357] In various cases of X₁ Cys Glu X₂ X₃ X₄ Asn Pro Ala Cys Thr Gly X₅ X₆ (SEQ ID NO:1556): at least one of X₁, X₃, X₄ and X₅ is Cys; at least two of X₁, X₃, X₄ and X₅ are Cys; at least three of X₁, X₃, X₄ and X₅ is Cys; X₁, X₃, X₄ and X₅ are Cys; X₁ and X₄ are Cys; X₃ and X₅ are Gly or Ala; X₃ and X₅ are Cys; X₁ and X₄ are Gly or Ala; X₁, X₃, X₄ and X₅ are Cys; X₂ is selected from: Ala, Arg, Asn, Asp, Cys, Gln, Glu, Gly, His, Ile, Lys, Met, Phe, Pro, Ser, Thr, Val, Trp and Tyr; one of X₁, X₃, X₄ and X₅ is Gly or Ala and the rest are Cys; two of X₁, X₃, X₄ and X₅ are Gly or Ala and the rest are Cys; three of X₁, X₃, X₄ and X₅ are Gly or Ala and the rest are Cys; X₁ and X₄ are independently Gly or Ala and X₃ and X₅ are Cys; X₃ and X₅ are independent Gly or Ala and X₁ and X₄ are Cys; X₂ is Phe, Tyr or Trp; X₂ is Phe; X₂ is Tyr; X₂ is Trp; X₆ is Tyr; X₆ is missing; X₁ is Gly or Ala; X₃ is Gly or Ala; X₄ is Gly or Ala; X₅ is Gly or Ala; X₁ and X₄ are Ala and X₃ and X₅ are Cys; X₃ and X₅ are Ala and X₁ and X₄ are Cys; X₁ and X₄ are Gly and X₃ and X₅ are Cys; X₃ and X₅ are Gly and X₁ and X₄ are Cys; one of X₁ and X₄ is Ala and the other is Gly and X₃ and X₅ are Cys; an one X₃ and X₅ is Ala and the other is Gly and X₁ and X₄ are Cys; the polypeptide comprises 100 or fewer amino acids; the polypeptide comprises 20 or fewer amino acids; the polypeptide comprises 15 or fewer amino acids. Additional cases are shown in FIG. 10.

[0358] The variants of the forgoing polypeptides can be created by insertion or deletion of amino acids. For example, one or two amino acids within the sequence X₁ Cys Glu X₂ X₃ X₄ Asn Pro Ala Cys Thr Gly X₅ X₆ (SEQ ID NO:1556) can be deleted. The deleted amino acids can be selected from Glu, X₂, Asn, Pro, Ala, Thr and Gly in the sequence X₁ Cys Glu X₂ X₃ X₄ Asn Pro Ala Cys Thr Gly X₅ X₆. In addition, insertions of 1, 2, 3, or 4 contiguous amino acids into a peptide having the sequence X₁ Cys Glu X₂ X₃ X₄ Asn Pro Ala Cys Thr Gly X₅ X₆ (SEQ ID NO:1556) can be made. Preferably the insertions are not between X₁ and Cys or between X₅ X₆ in a peptide having the sequence X₁ Cys Glu X₂ X₃ X₄ Asn Pro Ala Cys Thr Gly X₅ X₆ (SEQ ID NO:1556). Various insertion and deletion variants are depicted in FIGS. 11 and 12 (Xaa represents any amino acid.

[0359] In some cases, GC-C receptor binding polypeptides (D′) that can modified by the addition of pre, pro, prepro, N-terminal non-core, and C-terminal non-core sequences are SEQ ID NOs:1557-1594, 805, and 1595, respectively, as shown below:

(SEQ ID NO: 1557)
Cys Cys Glu Ala Cys Cys Asn Pro Ala Cys Thr Gly Cys
(SEQ ID NO: 1558)
Cys Cys Glu Arg Cys Cys Asn Pro Ala Cys Thr Gly Cys
(SEQ ID NO: 1559)
Cys Cys Glu Asn Cys Cys Asn Pro Ala Cys Thr Gly Cys
(SEQ ID NO: 1560)
Cys Cys Glu Asp Cys Cys Asn Pro Ala Cys Thr Gly Cys
(SEQ ID NO: 1561)
Cys Cys Glu Cys Cys Cys Asn Pro Ala Cys Thr Gly Cys
(SEQ ID NO: 1562)
Cys Cys Glu Gln Cys Cys Asn Pro Ala Cys Thr Gly Cys
(SEQ ID NO: 1563)
Cys Cys Glu Glu Cys Cys Asn Pro Ala Cys Thr Gly Cys
(SEQ ID NO: 1564)
Cys Cys Glu Gly Cys Cys Asn Pro Ala Cys Thr Gly Cys
(SEQ ID NO: 1565)
Cys Cys Glu His Cys Cys Asn Pro Ala Cys Thr Gly Cys
(SEQ ID NO: 1566)
Cys Cys Glu Ile Cys Cys Asn Pro Ala Cys Thr Gly Cys
(SEQ ID NO: 1567)
Cys Cys Glu Lys Cys Cys Asn Pro Ala Cys Thr Gly Cys
(SEQ ID NO: 1568)
Cys Cys Glu Met Cys Cys Asn Pro Ala Cys Thr Gly Cys
(SEQ ID NO: 1569)
Cys Cys Glu Phe Cys Cys Asn Pro Ala Cys Thr Gly Cys
(SEQ ID NO: 1570)
Cys Cys Glu Pro Cys Cys Asn Pro Ala Cys Thr Gly Cys
(SEQ ID NO: 1571)
Cys Cys Glu Ser Cys Cys Asn Pro Ala Cys Thr Gly Cys
(SEQ ID NO: 1572)
Cys Cys Glu Thr Cys Cys Asn Pro Ala Cys Thr Gly Cys
(SEQ ID NO: 1573)
Cys Cys Glu Trp Cys Cys Asn Pro Ala Cys Thr Gly Cys
(SEQ ID NO: 1574)
Cys Cys Glu Val Cys Cys Asn Pro Ala Cys Thr Gly Cys
(SEQ ID NO: 1575)
Cys Cys Glu Tyr Cys Cys Asn Pro Ala Cys Thr Gly Cys
(SEQ ID NO: 1576)
Cys Cys Glu Leu Cys Cys Asn Pro Ala Cys Thr Gly Cys
(SEQ ID NO: 1577)
Cys Cys Glu Ala Cys Cys Asn Pro Ala Cys Thr Gly Cys
Tyr
(SEQ ID NO: 1578)
Cys Cys Glu Arg Cys Cys Asn Pro Ala Cys Thr Gly Cys
Tyr
(SEQ ID NO: 1579)
Cys Cys Glu Asn Cys Cys Asn Pro Ala Cys Thr Gly Cys
Tyr
(SEQ ID NO: 1580)
Cys Cys Glu Asp Cys Cys Asn Pro Ala Cys Thr Gly Cys
Tyr
(SEQ ID NO: 1581)
Cys Cys Glu Cys Cys Cys Asn Pro Ala Cys Thr Gly Cys
Tyr
(SEQ ID NO: 1582)
Cys Cys Glu Gln Cys Cys Asn Pro Ala Cys Thr Gly Cys
Tyr
(SEQ ID NO: 1583)
Cys Cys Glu Glu Cys Cys Asn Pro Ala Cys Thr Gly Cys
Tyr
(SEQ ID NO: 1584)
Cys Cys Glu Gly Cys Cys Asn Pro Ala Cys Thr Gly Cys
Tyr
(SEQ ID NO: 1585)
Cys Cys Glu His Cys Cys Asn Pro Ala Cys Thr Gly Cys
Tyr
(SEQ ID NO: 1586)
Cys Cys Glu Ile Cys Cys Asn Pro Ala Cys Thr Gly Cys
Tyr
(SEQ ID NO: 1587)
Cys Cys Glu Lys Cys Cys Asn Pro Ala Cys Thr Gly Cys
Tyr
(SEQ ID NO: 1588)
Cys Cys Glu Met Cys Cys Asn Pro Ala Cys Thr Gly Cys
Tyr
(SEQ ID NO: 1589)
Cys Cys Glu Phe Cys Cys Asn Pro Ala Cys Thr Gly Cys
Tyr
(SEQ ID NO: 1590)
Cys Cys Glu Pro Cys Cys Asn Pro Ala Cys Thr Gly Cys
Tyr
(SEQ ID NO: 1591)
Cys Cys Glu Ser Cys Cys Asn Pro Ala Cys Thr Gly Cys
Tyr
(SEQ ID NO: 1592)
Cys Cys Glu Thr Cys Cys Asn Pro Ala Cys Thr Gly Cys
Tyr
(SEQ ID NO: 1593)
Cys Cys Glu Trp Cys Cys Asn Pro Ala Cys Thr Gly Cys
Tyr
(SEQ ID NO: 1594)
Cys Cys Glu Val Cys Cys Asn Pro Ala Cys Thr Gly Cys
Tyr
(SEQ ID NO: 805)
Cys Cys Glu Tyr Cys Cys Asn Pro Ala Cys Thr Gly Cys
Tyr
(SEQ ID NO: 1596)
Cys Cys Glu Leu Cys Cys Asn Pro Ala Cys Thr Gly Cys
Tyr

[0360] In some cases, D′ can be based on a sequence comprising, consisting of, or consisting essentially of the sequence: Cys Cys Glu Leu Cys Cys Asn Pro Ala Cys Thr Gly Cys Tyr (SEQ ID NO:1596). To create a variant having a potentially functional chymotrypsin cleavage site capable of inactivating the peptide, either the Leu (underlined) or the Thr (underlined) can be replaced by Trp, Phe or Tyr or both the Leu and the Thr can be replaced by (independently) Trp, Phe or Tyr. To create a variant having an analgesic di-peptide, the core sequence is followed by Asp Phe. The carboxy terminal Tyr in the core sequence can allow the Asp Phe dipeptide to be released by chymotrypsin in the digestive tract.

[0361] Useful variants of SEQ ID NO:1596 include, but are not limited to SEQ ID NOs: 1597-1601, 805, and 1602-1629:

(SEQ ID NO: 1597)
Asn Ser Ser Asn Tyr Cys Cys Glu Leu Cys Cys Asn Pro
Ala Cys Thr Gly Cys Tyr
(SEQ ID NO: 1598)
Asn Ser Ser Asn Tyr Cys Cys Glu Leu Cys Cys Asn Pro
Ala Cys Trp Gly Cys Tyr
(SEQ ID NO: 1550)
Asn Ser Ser Asn Tyr Cys Cys Glu Tyr Cys Cys Asn Pro
Ala Cys Thr Gly Cys Tyr
NSSNYCCEYCCNPACTGCY
(SEQ ID NO: 1599)
Cys Cys Glu Leu Cys Cys Asn Pro Ala Cys Thr Gly Cys
Tyr
(SEQ ID NO: 1600)
Cys Cys Glu Leu Cys Cys Asn Pro Ala Cys Trp Gly Cys
Tyr
(SEQ ID NO: 805)
Cys Cys Glu Tyr Cys Cys Asn Pro Ala Cys Thr Gly Cys
Tyr
(SEQ ID NO: 1601)
Asn Cys Cys Glu Leu Cys Cys Asn Pro Ala Cys Thr Gly
Cys Tyr
(SEQ ID NO: 1602)
Asn Cys Cys Glu Leu Cys Cys Asn Pro Ala Cys Trp Gly
Cys Tyr
(SEQ ID NO: 1603)
Asn Cys Cys Glu Phe Cys Cys Asn Pro Ala Cys Thr Gly
Cys Tyr
(SEQ ID NO: 1604)
Asn Cys Cys Glu Tyr Cys Cys Asn Pro Ala Cys Thr Gly
Cys Tyr
(SEQ ID NO: 1605)
Asn Cys Cys Glu Trp Cys Cys Asn Pro Ala Cys Thr Gly
Cys Tyr
(SEQ ID NO: 1606)
Asn Cys Cys Glu Arg Cys Cys Asn Pro Ala Cys Thr Gly
Cys Tyr
(SEQ ID NO: 1607)
Asn Cys Cys Glu Lys Cys Cys Asn Pro Ala Cys Thr Gly
Cys Tyr
(SEQ ID NO: 1608)
Asn Ser Ser Asn Tyr Cys Cys Glu Leu Cys Cys Asn Pro
Ala Cys Thr Gly Cys Tyr Asp Phe
(SEQ ID NO: 1609)
Asn Ser Ser Asn Tyr Cys Cys Glu Leu Cys Cys Asn Pro
Ala Cys Trp Gly Cys Tyr Asp Phe
(SEQ ID NO: 1610)
Asn Ser Ser Asn Tyr Cys Cys Glu Phe Cys Cys Asn Pro
Ala Cys Thr Gly Cys Tyr Asp Phe
(SEQ ID NO: 1611)
Asn Ser Ser Asn Tyr Cys Cys Glu Tyr Cys Cys Asn Pro
Ala Cys Thr Gly Cys Tyr Asp Phe
(SEQ ID NO: 1612)
Asn Ser Ser Asn Tyr Cys Cys Glu Trp Cys Cys Asn Pro
Ala Cys Thr Gly Cys Tyr Asp Phe
(SEQ ID NO: 1613)
Asn Ser Ser Asn Tyr Cys Cys Glu Arg Cys Cys Asn Pro
Ala Cys Thr Gly Cys Tyr Asp Phe
(SEQ ID NO: 1614)
Asn Ser Ser Asn Tyr Cys Cys Glu Lys Cys Cys Asn Pro
Ala Cys Thr Gly Cys Tyr Asp Phe
(SEQ ID NO: 1615)
Cys Cys Glu Leu Cys Cys Asn Pro Ala Cys Thr Gly Cys
Tyr Asp Phe
(SEQ ID NO: 1616)
Cys Cys Glu Leu Cys Cys Asn Pro Ala Cys Trp Gly Cys
Tyr Asp Phe
(SEQ ID NO: 1617)
Cys Cys Glu Phe Cys Cys Asn Pro Ala Cys Thr Gly Cys
Tyr Asp Phe
(SEQ ID NO: 1618)
Cys Cys Glu Tyr Cys Cys Asn Pro Ala Cys Thr Gly Cys
Tyr Asp Phe
(SEQ ID NO: 1619)
Cys Cys Glu Trp Cys Cys Asn Pro Ala Cys Thr Gly Cys
Tyr Asp Phe
(SEQ ID NO: 1620)
Cys Cys Glu Arg Cys Cys Asn Pro Ala Cys Thr Gly Cys
Tyr Asp Phe
(SEQ ID NO: 1621)
Cys Cys Glu Lys Cys Cys Asn Pro Ala Cys Thr Gly Cys
Tyr Asp Phe
(SEQ ID NO: 1622)
Asn Cys Cys Glu Leu Cys Cys Asn Pro Ala Cys Thr Gly
Cys Tyr Asp Phe
(SEQ ID NO: 1623)
Asn Cys Cys Glu Leu Cys Cys Asn Pro Ala Cys Trp Gly
Cys Tyr Asp Phe
(SEQ ID NO: 1624)
Asn Cys Cys Glu Phe Cys Cys Asn Pro Ala Cys Thr Gly
Cys Tyr Asp Phe
(SEQ ID NO: 1625)
Asn Cys Cys Glu Tyr Cys Cys Asn Pro Ala Cys Thr Gly
Cys Tyr Asp Phe
(SEQ ID NO: 1626)
Asn Cys Cys Glu Trp Cys Cys Asn Pro Ala Cys Thr Gly
Cys Tyr Asp Phe
(SEQ ID NO: 1627)
Asn Cys Cys Glu Arg Cys Cys Asn Pro Ala Cys Thr Gly
Cys Tyr Asp Phe
(SEQ ID NO: 1628)
Asn Cys Cys Glu Lys Cys Cys Asn Pro Ala Cys Thr Gly
Cys Tyr Asp Phe

[0362] GC-C agonists of the disclosure can also comprise, consist essentially of, or consist of peptides derived from the C-terminal domain of any of the peptides described herein. Thus, they can contain, for example, anywhere from 13-75 amino acids including 13, 14, 15, 16, 17, 18, 19, 20, 21, 22, 23, 24, 25, 26, 27, 28, 29, 30, 31, 32, 33, 34, 35, 36, 37, 38, 39, 40, 41, 42, 43, 44, 45, 46, 47, 48, 49, 50, 51, 52, 53, 54, 55, 56, 57, 58, 59, 60, 61, 62, 63, 64, 65, 66, 67, 68, 69, 70, 71, 72, 73, 74, and/or 75 amino acids of the C-terminal domain of any of the peptides described herein.

[0363] In some cases it may be desirable to have a polypeptide that includes a pre sequence (A′) from a first bacterial ST polypeptide and a pro sequence (B′) from a second bacterial ST polypeptide. In other cases, the pre sequence (A′) and the pro sequence (B′) are from the same ST polypeptide.

### Cleavage of Polypeptides

[0364] While polypeptides can be cleaved at the carboxy terminal side of methionine using cyanogen bromide, other chemical and enzymatic cleavage methods can be used, for example to remove a pre-sequence and/or a pro-sequence. In selecting an appropriate cleavage method, it is important to make certain that cleavage sites are not located within the desired final polypeptide, i.e., within the GC-C agonist polypeptide.

[0365] Described below are various chemical and enzymatic cleavage methods and the sequence requirements for each. In the two tables below, P1 is the amino acid that is at amino terminal side of the cleavage site, and P1′ is the amino acid that is at the carboxy terminal side of the cleavage site. P2′ is immediately carboxy-terminal to P1′. P2 is immediately amino terminal to P1; P3 is immediately amino terminal to P2; and P4 is immediately amino terminal to P3. A “-” indicates that any amino acid can be present at that position. In some cases it is important that a particular amino acid is not present at a particular position relative to the cleavage site, and this is indicated in the tables.

[0366] In some cases it may be desirable to have two different cleavages. In such cases two different enzymes or chemicals (or an enzyme and a chemical) can be used. If the reactions conditions for the two cleavages are compatible and if it is desirable to do so, the two cleavages can take place in the same reaction. Alternatively, two separate reactions can be performed. In some cases purification can take place between the two different cleavages such that one or more polypeptide fragments are removed between the first and second cleavages. In other cases no such purification takes place.

Chemical cleavage

| chemical | P1 | P1′ |
|---|---|---|
| CNBr | M | — |
| Formic acid | D | — |
| Hydroxylamine | N | G |
| Iodosobenzoic | W | — |
| acid | | |

Enzymatic Cleavage

| Protease | P4 | P3 | P2 | P1 | P1′ | P2′ |
|---|---|---|---|---|---|---|
| Arg-C proteinase | — | — | — | R | — | — |
| Asp-N endopeptidase | — | — | — | — | D | — |
| BNPS-Skatole | — | — | — | W | — | — |
| Caspase 1 | F, W, Y, or L | — | H, A or T | D | not P, E, D, Q, | — |
| | | | | | K or R | |
| Caspase 2 | D | V | A | D | not P, E, D, Q, | — |
| | | | | | K or R | |
| Caspase 3 | D | M | Q | D | not P, E, D, Q, | — |
| | | | | | K or R | |
| Caspase 4 | L | E | V | D | not P, E, D, Q, | — |
| | | | | | K or R | |
| Caspase 5 | L or W | E | H | D | — | — |
| Caspase 6 | V | E | H or I | D | not P, E, D, Q, | — |
| | | | | | K or R | |
| Caspase 7 | D | E | V | D | not P, E, D, Q, | — |
| | | | | | K or R | |
| Caspase 8 | I or L | E | T | D | not P, E, D, Q, | — |
| | | | | | K or R | |
| Caspase 9 | L | E | H | D | — | — |
| Caspase 10 | I | E | A | D | — | — |
| Chymotrypsin-high | — | — | — | F or Y | not P | — |
| specificity | | | | | | |
| Chymotrypsin-high | — | — | — | W | not M or P | — |
| specificity | | | | | | |
| Chymotrypsin-low | — | — | — | F, L or Y | not P | — |
| specificity | | | | | | |
| Chymotrypsin-low | — | — | — | W | not M or P | — |
| specificity | | | | | | |
| Chymotrypsin-low | — | — | — | M | not P or Y | — |
| specificity | | | | | | |
| Chymotrypsin-low | — | — | — | H | not D, M, P | — |
| specificity | | | | | or W | |
| Clostripain | — | — | — | R | — | — |
| (Clostridiopeptidase B) | | | | | | |
| Enterokinase | D or N | D or N | D or N | K | — | — |
| Factor Xa | A, F, G, I, L, | D or E | G | R | — | — |
| | T, V or M | | | | | |
| Glutamyl | — | — | — | E | — | — |
| endopeptidase | | | | | | |
| GranzymeB | I | E | P | D | — | — |
| LysC | — | — | — | K | — | — |
| Pepsin (pH 1.3) | — | not H, K, or R | not P | not R | F, L, W or Y | not P |
| Pepsin (pH 1.3) | — | not H, K, or R | not P | F, L, W or Y | — | not P |
| Pepsin (pH > 2) | — | not H, K or R | not P | not R | F or L | not P |
| Pepsin (pH > 2) | — | not H, K or R | not P | F or L | — | not P |
| Proline-endopeptidase | — | — | H, K or R | P | not P | — |
| Proteinase K | — | — | — | A, E, F, I, L, | — | — |
| | | | | T, V, W or Y | | |
| Staphylococcal | — | — | not E | E | — | — |
| peptidase I | | | | | | |
| Thermolysin | — | — | — | not D or E | A, F, I, L, | — |
| | | | | | M or V | |
| Thrombin | — | — | G | R | G | — |
| Thrombin | A, F, G, I, L, | A, F, G, I, L, | P | R | not D or E | not DE |
| | T, V or M | T, V, W or A | | | | |
| Trypsin | — | — | — | K or R | not P | — |
| Trypsin | — | — | W | K | P | — |
| Trypsin | — | — | M | R | P | — |

### Asparagine Substitutions

[0367] In some cases, any of the polypeptides described herein may comprise Asn having the structure:

[chemical structure]

optionally replaced by a group having a structure selected from (a), (b) and (c):

[chemical structure]

provided that an Asn at the carboxy terminus is not replaced by structure (a) or structure (c).

[0368] In various cases: at least one Asn is replaced by a group having structure (a at least one Asn is replaced by a group having structure (b); at least one Asn is replaced by a group having structure (c); an Asn at the amino terminus of the polypeptide is replaced by a structure selected from (a), (b) and (c); an Asn at the carboxy terminus of the polypeptide is replaced by a structure (b); an Asn that is neither at the carboxy terminus of the polypeptide nor the at the amino terminus of the polypeptide is replaced by a structure selected from (a), (b) and (c); all Asn are replaced by a structure selected from (a), (b) and (c); at least two Asn are replaced by a structure selected from (a), (b) and (c); at least three Asn are replaced by a structure selected from (a), (b) and (c); at least four Asn are replaced by a structure selected from (a), (b) and (c); at least five Asn are replaced by a structure selected from (a), (b) and (c); at least six Asn are replaced by a structure selected from (a), (b) and (c); all Asn replaced by a structure selected from (a), (b) and (c) are replaced by structure (a); all Asn replaced by a structure selected from (a), (b) and (c) are replaced by structure (b); all Asn replaced by a structure selected from (a), (b) and (c) are replaced by structure (c); at least one Asn within A′, when A′ is present, is replaced by a structure selected from (a), (b) and (c); at least one Asn within B′, when B′ is present, is replaced by a structure selected from (a), (b) and (c); at least one Asn within C′, when C′ is present, is replaced by a structure selected from (a), (b) and (c); at least one Asn within D′, when D′ is present, is replaced by a structure selected from (a), (b) and (c); at least one Asn within E′, when E′ is present, is replaced by a structure selected from (a), (b) and (c); at least one Asn within A′, when A′ is present, is replaced by structure (a); at least one Asn within B′, when B′ is present, is replaced by structure (a); at least one Asn within C′, when C′ is present, is replaced by structure (a); at least one Asn within D′, when D′ is present, is replaced by structure (a); at least one Asn within E′, when E′ is present, is replaced by structure (a); at least one Asn within A′, when A′ is present, is replaced by structure (b); at least one Asn within B′, when B′ is present, is replaced by structure (b); at least one Asn within C′, when C′ is present, is replaced by structure (b); at least one Asn within D′, when D′ is present, is replaced by structure (b); at least one Asn within E′, when E′ is present, is replaced by structure (b); at least one Asn within A′, when A′ is present, is replaced by structure (c); at least one Asn within B′, when B′ is present, is replaced by structure (c); at least one Asn within C′, when C′ is present, is replaced by structure (c); at least one Asn within D′, when D′ is present, is replaced by structure (c); and least one Asn within E′, when E′ is present, is replaced by structure (c)

[0369] Also disclosed a polypeptide produced by the hydrolysis of structure (a), (b), and/or (c) within any of the aforementioned polypeptides.

[0370] In certain cases the peptides include either one or two or more contiguous negatively charged amino acids (e.g., Asp or Glu) or one or two or more contiguous positively charged residues (e.g., Lys or Arg) or one or two or more contiguous positively or negatively charged amino acids at the carboxy terminus. In these cases all of the flanking amino acids at the carboxy terminus are either positively or negatively charged. In other cases the carboxy terminal charged amino acids are preceded by a Leu. For example, any of the following amino acid sequences can be added to the carboxy terminus of the peptide: Asp; Asp Lys; Lys Lys Lys Lys Lys Lys; Asp Lys Lys Lys Lys Lys Lys; Leu Lys Lys; and Leu Asp. It is also possible to simply add Leu at the carboxy terminus.

[0371] Also described are nucleic acid molecules comprising a nucleotide sequences encoding an aforementioned polypeptide. The nucleic molecules can optionally include transcription and translation control sequences operably linked to the polypeptide encoding sequences such that the nucleic acid molecule can direct the expression of the polypeptide within a prokaryotic cell, for example, E. coli. The nucleic acid molecule can be within a vector that allows replication in a prokaryotic cell and includes a slectable marker. Also described are cells (e.g., prokaryotic cells) harboring the nucleic acid molecule and cells harboring the vector. Such cells are commonly referred to a recombinant cells.

[0372] Compositions, including pharmaceutical compositions, can include at least one such polypeptide or can include at least two (three, four or more) such polypeptides which are different. In the compositions containing two or more such polypeptides the polypeptides can be separate or they can be covalently direct linked, e.g., by a peptide bond or a linker or they can be indirectly linked. For example, two such polypeptide sequences can be contained within a larger polypeptide and the two polypeptide sequences can be separated by other polypeptide sequences.

[0373] Variant Polypeptides

[0374] The disclosure includes variant polypeptides that can include one, two, three, four, or five or more (e.g., 6, 7, 8, 9, 10, 11, 12, 13, 14, or 15) amino acid substitutions compared to any of the polypeptides described above. The substitution(s) can be conservative or non-conservative. The naturally-occurring amino acids can be substituted by D-isomers of any amino acid, non-natural amino acids, natural and non-natural amino acid analogs, and other groups. A conservative amino acid substitution results in the alteration of an amino acid for a similar acting amino acid, or amino acid of like charge, polarity, or hydrophobicity. At some positions, even conservative amino acid substitutions can reduce the activity of the polypeptide. A conservative substitution can substitute a naturally-occurring amino acid for a non-naturally-occurring amino acid. Among the naturally occurring amino acid substitutions generally considered conservative are:

| For | Replace |
|---|---|
| Ala | Gly, Cys, |
| Arg | Lys, His |
| Asn | Asp, Glu, |
| Asp | Asn, Glu, |
| Cys | Met, Thr, |
| Gln | Asn, Glu, |
| Glu | Asp, Asn, |
| Gly | Ala |
| His | Lys, Arg |
| Ile | Val, Leu, |
| Leu | Val, Ile, |
| Lys | Arg, His |
| Met | Ile, Leu, Val |
| Phe | Tyr, His, |
| Pro | |
| Ser | Thr, Cys, |
| Thr | Ser, Met, |
| Trp | Phe, Tyr |
| Tyr | Phe, His |
| Val | Leu, Ile, |

[0375] In general, “identity,” as used herein, refers to an exact nucleotide-to-nucleotide or amino acid-to-amino acid correspondence of two polynucleotides or polypeptide sequences, respectively. Percent identity can be determined by a direct comparison of the sequence information between two molecules by aligning the sequences, counting the exact number of matches between the two aligned sequences, dividing by the length of the shorter sequence, and multiplying the result by 100. Readily available computer programs can be used to aid in the analysis, such as ALIGN, Dayhoff, M. O. in Atlas of Protein Sequence and Structure M. O. Dayhoff ed., 5 Suppl. 3:353-358, National biomedical Research Foundation, Washington, D.C., which adapts the local homology algorithm of Smith and Waterman Advances in Appl. Math. 2:482-489, 1981 for peptide analysis. Programs for determining nucleotide sequence identity are available in the Wisconsin Sequence Analysis Package, Version 8 (available from Genetics Computer Group, Madison, Wis.) for example, the BESTFIT, FASTA and GAP programs, which also rely on the Smith and Waterman algorithm. These programs are readily utilized with the default parameters recommended by the manufacturer and described in the Wisconsin Sequence Analysis Package referred to above. For example, percent identity of a particular nucleotide sequence to a reference sequence can be determined using the homology algorithm of Smith and Waterman with a default scoring table and a gap penalty of six nucleotide positions.

[0376] The peptides of the disclosure can be present with a counterion. Useful counterions include salts of: acetate, benzenesulfonate, benzoate, calcium edetate, camsylate, carbonate, citrate, edetate (EDTA), edisylate, embonate, esylate, fumarate, gluceptate, gluconate, glutamate, glycollylarsanilate, hexylresorcinate, iodide, bromide, chloride, hydroxynaphthoate, isethionate, lactate, lactobionate, estolate, maleate, malate, mandelate, mesylate, mucate, napsylate, nitrate, pantothenate, phosphate, salicylate, stearate, succinate, sulfate, tartarate, tartrate, hydrochlorate, theoclate, acetamidobenzoate, adipate, alginate, aminosalicylate, anhydromethylenecitrate, ascorbate, aspartate, camphorate, caprate, caproate, caprylate, cinnamate, cyclamate, dichloroacetate, formate, gentisate, glucuronate, glycerophosphate, glycolate, hippurate, fluoride, malonate, napadisylate, nicotinate, oleate, orotate, oxalate, oxoglutarate, palmitate, pectinate, pectinate polymer, phenylethylbarbiturate, picrate, propionate, pidolate, sebacate, rhodanide, tosylate, and tannate.

### Expression Constructs

[0377] The present disclosure features expression constructs encoding one or more isolated nucleic acids encoding one or more guanylyl cyclase C (GC-C) activating prohormones (e.g., prohormone forms of guanylin (GN) and/or uroguanylin (UGN)). In general, suitable expression constructs include those capable of entering a target cell (e.g., a prokaryotic and/or eukaryotic cell) and maintaining and expressing one or more of the peptides described herein within the target cell.

[0378] Exemplary expression constructs include, but are not limited to, naked DNA constructs, DNA vectors, and viral vectors. Combinations of expression vectors, for example, combinations of naked DNA constructs, DNA vectors, and/or viral vectors, are also useful in the presently described methods.

[0379] Expression constructs can include, but are not limited to, one or more of the components detailed below. Such components may be useful, e.g., to target the construct into a target cell and/or promote and/or enhance expression (including transcription and/or translation) of the construct and its components in a target cell. The choice of components to include in a construct can be optimized to, for example, yield the highest expression level of the construct encoded nucleic acid in the target cell. Such components are well known in the art and their use is described, for example, in Current Protocols in Molecular Biology, Ausubel, F. M. et al. (eds.) Greene Publishing Associates, (1989), Sections 9.10-9.14 and other standard laboratory manuals.

[0380] Promoter Sequences

[0381] Promoter sequences can be used to drive the expression (transcription) of one or more nucleic acid sequences in a target cell. In some cases, one promoter can be operatively linked to one or more nucleic acid sequences encoding one or more of the polypeptides described herein. When one promoter is operatively linked to two or more nucleic acids encoding two or more of the polypeptides described herein, one or more internal ribosome entry site (IRES) elements can be inserted, e.g., between each nucleic acid.

[0382] Exemplary promoter sequences that can be used in the expression constructs of the present disclosure include, e.g., promoter sequences capable of driving gene expression in target cell.

[0383] Promoters can be selected based on the relative strength of the promoter in a target cell (e.g., a specific prokaryotic cell such as Escherichia coli or a eukaryotic cell). The sequence and relative strengths of common promoters are well known in the art. Expression constructs can include one or more prokaryotic promoter sequences operatively linked to a nucleic acid encoding a peptide described herein (e.g., one promoter per peptide). Expression constructs containing more than one promoter may contain multiple copies of the same promoter and/or different promoters. The choice of promoter or promoter combinations can be optimized to yield the highest expression level of the peptide of interest in the target cell. Commonly used prokaryotic promoter sequences that may be useful in the present disclosure include, but are not limited to, T7, T3, and T5 bacteriovirus promoter sequences. Methods for selecting strong bacterial promoters are described, e.g., by Sakanyan (E.P. 1, 441, 036). Other exemplary promoters useful for expression in E. coli are described, e.g., by O'Neill (O'Neill, Jour. Biol. Chem., 264:5522-5530, 1989).

[0384] Alternatively or in addition, an expression construct can include one or more eukaryotic promoter sequences. A database of well known eukaryotic promoters can be accessed, for example at world wide web address epd.isb-sib.ch. The sequence and relative strengths of common eukaryotic promoters are well known in the art.

[0385] In some cases, one or more promoter sequences can be operatively linked to one or more of the polypeptide encoding nucleotide sequences described herein.

[0386] IBES Elements

[0387] Internal ribosomal entry site (IRES) elements are nucleotide sequences that allow for cap-independent translation initiation in the middle of a messenger RNA (mRNA). IRES elements can be usefully inserted, e.g., into bicistronic expression constructs to support the expression (translation) of a second nucleic acid. IRES elements can be added intercistronicly to a construct to confer internal initiation of translation of an mRNA product independent of a 5′ cap. Exemplary IRES elements include those present in, e.g., picornavirus, poliovirus, encephalomyocarditis virus, foot-and-mouth disease virus, flavivirus, hepatitis C virus, pestivirus, classical swine fever virus, retrovirus, murine leukemia virus, lentivirus, simian immunodeficiency virus, insect RNA virus, and cricket paralysis virus.

[0388] Antibiotic Resistance Genes

[0389] Antibiotic resistance genes are routinely included in expression constructs. Inclusion of the antibiotic to which the gene confers resistance ensures that only bacteria containing the expression construct replicate. Commonly used antibiotic resistance genes include, but are not limited to, genes conferring resistance to, for example, ampicillin, kanamycin, tetracycline, chloramphenicol, Zeocin3, G418, and gentamycin. The nucleotide sequences and use of such genes are known in the art.

[0390] Shine-Dalgarno Sequence

[0391] Shine-Dalgarno Sequences are useful for promoting efficient translation in prokaryotic cells. Shine-Dalgarno Sequences are typically located 6-7 nucleotides upstream from a start codon. The Shine-Dalgarno nucleotide sequence is known in the art.

[0392] Multiple Cloning Site

[0393] Multiple cloning sites typically contain several well characterized restriction endonuclease sites to facilitate insertion of DNA fragments into an expression construct. One or more multiple cloning sites may be usefully added to a expression construct.

[0394] Affinity Tags

[0395] Affinity tags can be used to isolate and/or purify expressed polypeptides. Nucleotide sequences encoding one or more tags can be inserted or positioned, e.g., in frame, onto the amino and/or carboxy-terminals of a nucleotide sequence encoding a protein of interest. Translation of such a construct yields a recombinant fusion protein. Routine methods are available to isolate the expressed fusion protein. Exemplary useful affinity tags include, but are not limited to E. coli maltose E binding protein (MBP), glutathione S-transferase (GST), hexa-histidine (6-His), thioredoxin (TrxA), S-Tag, the Xpress3 epitope, protein A, FLAG tag, hexa-histidine, myc tag and the influenza HA tag.

[0396] Affinity Tags

[0397] In some instances where affinity tags are utilized, DNA sequence encoding a protease recognition site will be fused between the nucleotide sequence encoding the affinity tag and the nucleotide sequence encoding the polypeptide of interest. One or more protease recognition sites can be included, e.g., to allow proteolytic cleavage of a purification tag from a protein of interest, e.g., following isolation and purification of the fusion protein. Exemplary protease recognition sites include but are not limited to, the PreScission3 protease recognition site (Leu-Glu-Val0-Leu-Phe-Gln-Gly-Pro (SEQ ID NO: 25)), the enterokinase protease recognition site (Asp-Asp-Asp-Asp-Lys (SEQ ID NO:26), the factor Xa protease recognition site (Ile-X₁-Gly-Arg, where X₁ is Glu or Asp (SEQ ID NO:27)), the thrombin protease recognition site (Leu-Val-Pro-Arg-Gly-Ser (SEQ ID NO:28)), and the TEV protease recognition site (Glu-Asn-Leu-Tyr-Phe-Gln-Gly (SEQ ID NO:29)). Protease recognition sites and proteolytic cleavage methods are described, for example, by LaVallie et al. (Enzymatic and Chemical Cleavage of Fusion Proteins, In Current Protocols in Molecular Biology. Page 16.4.5-16.4.17, John Wiley and Sons, Inc., New York, N.Y.).

[0398] In some cases, useful expression constructs can include one or more components selected from the group consisting of an internal ribosomal entry site (IRES) element, a polyadenylation signal, a Kozak Consensus Sequence, an enhancer element, one or more heterologous and synthetic introns, and one or more signal sequences.

[0399] In some cases, the polypeptides described herein can be produced (e.g., expressed) using, for example, a DNA vector. Such vectors can include a bacterial or bacteriophage DNA such as bacteriophage lambda or M13 and derivatives thereof. DNA vectors are known in the art and typically are circular, double stranded, DNA molecules that include at least one promoter sequence that facilitates expression (transcription and translation) of the DNA vector and its components and/or one or more nucleic acids that have been introduced into the vector in a target cell.

[0400] In some cases, the polypeptides described herein can be expressed using pET32b (Novagen). Other exemplary useful expression vectors include, but are not limited to, for example pGEX (Pharmacia Biotech Inc; Smith, D. B. and Johnson, K. S. (1988) Gene, 67:31-40), pMAL (New England Biolabs, Beverly, Mass.) and pRIT5 (Pharmacia, Piscataway, N.J.) which fuse glutathione S-transferase (GST), maltose E binding protein, and protein A, respectively. Other useful vectors are commercially available from, e.g., Novagen, Invitrogen, Promega, Pharmacia, New England Biolabs, and GE Healthcare

[0401] In some cases, uptake of an expression vector into a target cell can be facilitated (e.g., improved) by combining the DNA vector with, for example, a cationic lipid, and forming a DNA complex.

[0402] Methods of using the polypeptides described herein are described by Currie et al., (Publication No. WO2007/002971).

[0403] Polypeptide Production

[0404] As described herein, amino acid sequences (e.g., polypeptides) can be treated with cyanogen bromide to produce a polypeptide that is capable of binding to and/or activating the GC-C receptor. These methods generally require the introduction of one or more methionine residues (e.g., one, two, three, or more methionine residues) at one or more locations within an amino acid chain where cleavage is required. For example, one or more methionine residues can be introduced at a location within a single amino acid sequence that results in the generation of two or more separate amino acid sequences. In some cases, one or more of these resulting amino acid sequences will be capable of binding to and/or activating the GC-C receptor.

[0405] One or more methionine residues can be introduced into a nucleotide sequence by chemically synthesizing a nucleotide sequence encoding a methionine codon (ATG) at the desired position. Alternatively or in addition, one or more codons encoding methionine can be introduced into a nucleotide sequence at the desired position using a in vitro mutagenesis kit, for example the QuikChange® Site Directed Mutagenesis kit (Stratagene). Alternatively or in addition, an amino acid sequence can be chemically synthesized with one or more methionine residues inserted at the desired position.

[0406] Nucleic acid sequences encoding one or more of the polypeptides described herein can be inserted into an expression construct using, e.g., standard molecular biological cloning and/or subcloning techniques, e.g., polymerase chain reaction (PCR), restriction enzyme digestion, agarose gel electrophoresis, DNA purification (e.g., using agarose gel electrophoresis, phenol:chloroform extraction and/or commercially available DNA purification kits), and DNA ligation. Required clones (e.g., encoding nucleic acids encoding polypeptides of interest) can be obtained and introduced into a cell, e.g., an E. coli cell. These E. coli cells can then be used to produce further clones and can be stored as glycerol stocks. Alternatively or in addition, isolated expression constructs can be stored in a suitable buffer (e.g., TE buffer containing 10 mM Tris-Cl, pH 7.5 and 1 mM EDTA). Requied clones can be verified using sequence analysis. Such expression constructs can be used to express one or more of the polypeptides described herein in a cell.

[0407] In some cases, one or more of the polypeptides described herein can be expressed, for example, in prokaryotic or eukaryotic cells. In some cases, the polypeptides can be expressed in E. coli, insect cells (e.g., using baculovirus expression vectors), yeast cells, or mammalian cells (e.g., CHO or COS cells). Suitable host cells are discussed further in Goeddel, (1990) Gene Expression Technology: Methods in Enzymology 185, Academic Press, San Diego, Calif. When expressing a polypeptide in a host cell it can be desirable to adapt the coding sequence of the peptide for the codon bias of the host cell. Alternatively or in addition, expression vectors can be transcribed and translated in vitro, for example using T7 promoter regulatory sequences and T7 polymerase. Alternatively or in addition, polypeptides can be chemically synthesized.

[0408] Cyanogen bromide is a chemical used to hydrolyze peptide bonds C-terminal to methionine residues in peptides and proteins (Gross et al., Biochemistry, 6:745-748, 1967 and Kaiser and Metzka, Anal. Biochem., 266:1-8, 1999). One of skill in the art will appreciate that insertion of a methionine residue into a sequence will result in the cleavage of that sequence at a point immediately following the inserted methionine, following treatment with cyanogen bromide. Insertion of a methionine into a peptide sequence that does not encode any other methionine sequences will yield two peptides, following treatment with cyanogen bromide. The presence or insertion of multiple methionine residues in a sequence will yield multiple peptides, following treatment with cyanogen bromide. In some cases, a methionine residue can be inserted between the pro and mature sequences of the peptides described herein. Alternatively or in addition, a polypeptide can be modified by removing (e.g., deleting or substituting, e.g., conservative substitutions) one or more methionine residues, e.g., to prevent cleavage of the polypeptide. In some cases, such a modification will not alter the ability of the polypeptide to bind to and/or activate the GC-C receptor.

[0409] In some cases, the polypeptides described herein will be purified (e.g., isolated) from any contaminating material prior to and/or following cyanogen bromide treatment. Such purified polypeptides, e.g., solutions comprising purified polypeptides, can be essentially free of contaminanting material (e.g., material that may be detrimental to the shelf life and/or activity of the polypeptide). For example, powders and/or in a solutions containing purified polypeptides can be 30, 40, 50, 60, 70, 80, 90, 95, 98, 99% and 100% free of contaminating materials.

[0410] All the molecular biological techniques required to generate an expression construct described herein are standard techniques that will be appreciated by one of skill in the art. Detailed methods may also be found, e.g., Current Protocols in Molecular Biology, Ausubel, F. M. et al. (eds.) Greene Publishing Associates, (1989), Sections 9.10-9.14 and other standard laboratory manuals.

### Biological Activity Assessment Methods

[0411] Biological activity as used herein refers to the ability of a polypeptide to bind to and/or activate a GC-C receptor. Methods for determining, confirming, and/or quantifying the biological activity of one or more of the polypeptides described herein are described below and in the Examples.

[0412] Effect on cGMP Levels and Secretion in Ligated Loops Rodent Models

[0413] The effect of polypeptides/GC-C agonists described herein on cGMP levels and secretion are studied by injecting polypeptides/GC-C agonists described herein directly into an isolated loop in either wild-type or GC-C KO mice. This is done by surgically ligating a loop in the small intestine of the mouse. The methodology for ligated loop formation is similar to that described in London et al. 1997 Am J Physiol p.G93-105. The loop is roughly centered and is a length of 1-3 cm. The loops are injected with 100 μl of one or more of the above described peptides (5 μg) or vehicle (20 mM Tris, pH 7.5 or Krebs Ringer, 10 mM Glucose, HEPES buffer (KRGH)). Following a recovery time of 90 minutes the loops are excised. Weights are recorded for each loop before and after removal of the fluid contained therein. The length of each loop is also recorded. A weight to length ratio (W/L) for each loop is calculated to determine the effects of the polypeptide/GC-C agonist described herein on secretion.

[0414] To determine the effect of the polypeptide/GC-C agonist described herein on cGMP activity, fluid from the loop is collected in ice-cold trichloracetic acid (TCA) and stored at −80° C. for use in an assay to measure cGMP levels in the fluid. Intestinal fluid samples are TCA extracted, and cyclic GMP is measured by EIA according to procedures outlined in the Cayman Chemical Cyclic GMP EIA kit (Cayman Chemical, Ann Arbor, Mich.) to determine cyclic GMP levels in the intestinal fluid of the mouse in the presence of either polypeptide/GC-C agonist described herein or vehicle.

[0415] The effects of polypeptides/GC-C agonists described herein on cGMP levels and secretion in ligated loops in female CD rats can also be determined using protocols similar to those described above. In the case of the rat, however four loops of intestine are surgically ligated. The first three loops are distributed equally in the small intestine and the fourth loop is located in colon. Loops are 1 to 3 centimeters, and are injected with 2004 of either polypeptide/agonist described herein (5 μg) or vehicle (Krebs Ringer, 10 mM glucose, HEPES buffer (KRGH)).

[0416] Intestinal GC-C Receptor Binding and Activity Assays

[0417] The ability of polypeptides, variant polypeptides and other compounds to bind to and activate the intestinal GC-C receptor can be tested using the T84 human colon carcinoma cell line (American Type Culture Collection (Bethesda, Md.).

[0418] Briefly, cells are grown to confluency in 24-well culture plates with a 1:1 mixture of Ham's F12 medium and Dulbecco's modified Eagle's medium (DMEM), supplemented with 5% fetal calf serum and are used at between passages 54 and 60.

[0419] Monolayers of T84 cells in 24-well plates are washed twice with 1 ml/well DMEM, then incubated at 37° C. for 10 min with 0.45 ml DMEM containing 1 mM isobutylmethylxanthine (IBMX), a cyclic nucleotide phosphodiesterase inhibitor. Test polypeptides (50Tl) are then added and incubated for 30 minutes at 37° C. The media is aspirated and the reaction is terminated by the addition of ice cold 0.5 ml of 0.1N HCl. The samples are held on ice for 20 minutes and then evaporated to dryness using a heat gun or vacuum centrifugation. The dried samples are resuspended in 0.5 ml of phosphate buffer provided in the Cayman Chemical Cyclic GMP EIA kit (Cayman Chemical, Ann Arbor, Mich.). Cyclic GMP is measured by EIA according to procedures outlined in the Cayman Chemical Cyclic GMP EIA kit.

[0420] For the binding assay, T84 cell monolayers in 24-well plates are washed twice with 1 ml of binding buffer (DMEM containing 0.05% bovine serum albumin and 25 mM HEPES, pH 7.2), then incubated for 30 min at 37° C. in the presence of mature radioactively labeled E. coli ST polypeptide and the test material at various concentrations. The cells are then washed 4 times with 1 ml of DMEM and solubilized with 0.5 ml/well 1N NaOH. The level of radioactivity in the solubilized material is then determined using standard methods.

[0421] Murine Gastrointestinal Transit (GIT) Assay

[0422] In order to determine whether a test compound or a polypeptide, increases the rate of gastrointestinal transit, the test compound can be tested in the murine gastrointestinal transit (GIT) assay (Moon et al. Infection and Immunity 25:127, 1979). In this assay, charcoal, which can be readily visualized in the gastrointestinal tract is administered to mice after the administration of a test compound. The distance traveled by the charcoal is measured and expressed as a percentage of the total length of the colon.

[0423] Mice are fasted with free access to water for 12 to 16 hours before the treatment with polypeptide or control buffer. The polypeptides are orally administered at 1 μg/kg-1 mg/kg of polypeptide in buffer (20 mM Tris pH 7.5) seven minutes before being given an oral dose of 5% Activated Carbon (Aldrich 242276-250G). Control mice are administered buffer only before being given a dose of Activated Carbon. After 15 minutes, the mice are sacrificed and their intestines from the stomach to the cecum are dissected. The total length of the intestine as well as the distance traveled from the stomach to the charcoal front is measured for each animal and the results are expressed as the percent of the total length of the intestine traveled by the charcoal front. Results are reported as the average of 10 mice±standard deviation. A comparison of the distance traveled by the charcoal between the mice treated with polypeptide versus the mice treated with vehicle alone is performed using a Student's t test and a statistically significant difference is considered for P<0.05. Positive controls for this assay may include commercially available wild-type ST polypeptide (Sigma-Aldrich, St Louis, Mo.) and Zelnorm®, a drug approved for IBS that is an agonist for the serotonin receptor 5HT4.

[0424] Similar assays can be performed in other rodents, for example, rats. In addition, GIT assays can be performed and compared in wild-type versus rodents lacking the guanylate cyclase C receptor (GC-C KO), for example, using the GC-C KO mice described in Mann et al 1997 Biochem and Biophysical Research Communications 239:463.

[0425] Kd Determination and Binding Assays

[0426] To determine the affinity of polypeptides/GC-C agonists described herein for GC-C receptors found in rat intestinal mucosa, a competition binding assay is performed using rat intestinal epithelial cells. Epithelial cells from the small intestine of rats are obtained as described by Kessler et al. (J. Biol. Chem. 245: 5281-5288 (1970)). Briefly, animals are sacrificed and their abdominal cavities exposed. The small intestine is rinsed with 300 ml ice cold saline or PBS. 10 cm of the small intestine measured at 10 cm from the pylorus is removed and cut into 1 inch segments. Intestinal mucosa is extruded from the intestine by gentle pressure between a piece of parafilm and a P-1000 pipette tip. Intestinal epithelial cells are placed in 2 ml PBS and pipetted up and down with a 5 ml pipette to make a suspension of cells. Protein concentration in the suspension is measured using the Bradford method (Anal. Biochem. 72: 248-254 (1976)).

[0427] A competition binding assay is performed based on the method of Giannella et al. (Am. J. Physiol. 245: G492-G498) between [¹²⁵I] labeled control polypeptide (e.g. wild-type guanylin, uroguanylin or ST polypeptide) and a polypeptide/GC-C agonist described herein.

[0428] The assay mixture contains: 0.5 ml of DME with 20 mM HEPES-KOH pH 7.0, 0.9 mg of the cell suspension listed above, 21.4 fmol [¹²⁵I]-labeled control polypeptide (42.8 pM), and different concentrations of competitor polypeptide/GC-C agonist described herein (0.01 to 1000 nM). The mixture is incubated at room temperature for 1 hour, and the reaction stopped by applying the mixture to GF/B glass-fiber filters (Whatman). The filters are washed with 5 ml ice-cold PBS and radioactivity is measured. Kd is determined. % B/Bo is the percentage of the ratio of radioactivity trapped in each sample (B) compared to the radioactivity retained in a control sample with no cold competitor (Bo).

[0429] Similar competition binding assays are performed in intestinal epithelial cells from wild-type and guanylate cyclase C knockout (GC-C KO; Mann et al. 1997 Biochem and Biophysical Research Communications 239:463) mice. Mouse intestinal epithelial cells are prepared identical to that above as for rat intestinal epithelial cells except the cells are homogenized with an Omni homogenizer for 20 seconds on the maximum setting to make a suspension of cells. A competition binding assay is performed identical to that described above between ¹²⁵I labeled polypeptide/GC-C agonist described herein and unlabeled polypeptide/GC-C agonist described herein (competitor).

[0430] Pharmacokinetic Property Determination of the Polypeptides Described Herein

[0431] Serum samples are extracted from the whole blood of exposed (mice dosed orally or intravenously with polypeptide(s) described herein) and control mice, then injected directly (10 mL) onto an in-line solid phase extraction (SPE) column (Waters Oasis HLB 25 μm column, 2.0×15 mm direct connect) without further processing. The sample on the SPE column is washed with a 5% methanol, 95% dH₂O solution (2.1 mL/min, 1.0 minute), then loaded onto an analytical column using a valve switch that places the SPE column in an inverted flow path onto the analytical column (Waters Xterra MS C8 5 μm IS column, 2.1×20 mm). The sample is eluted from the analytical column with a reverse phase gradient (Mobile Phase A: 10 mM ammonium hydroxide in dH₂O, Mobile Phase B: 10 mM ammonium hydroxide in 80% acetonitrile and 20% methanol; 20% B for the first 3 minutes then ramping to 95% B over 4 min. and holding for 2 min., all at a flow rate of 0.4 mL/min.). At 9.1 minutes, the gradient returns to the initial conditions of 20% B for 1 min. polypeptide is eluted from the analytical column and is detected by triple-quadrapole mass spectrometry (MRM, 764 (+2 charge state)>182 (+1 charge state) Da; cone voltage=30V; collision=20 eV; parent resolution=2 Da at base peak; daughter resolution=2 Da at base peak). Instrument response is converted into concentration units by comparison with a standard curve using known amounts of chemically synthesized polypeptide(s) prepared and injected in mouse plasma using the same procedure.

[0432] Similarly, pharmacokinetic properties are determined in rats using LCMS methodology. Rat plasma samples containing the polypeptide are extracted using a Waters Oasis MAX 96 well solid phase extraction (SPE) plate. A 200 μL volume of rat plasma is mixed with 200 μL of ¹³C₉, ¹⁵N-labeled polypeptide in the well of a prepared SPE plate. The samples are drawn through the stationary phase with 15 mm Hg vacuum. All samples are rinsed with 200 μL of 2% ammonium hydroxide in water followed by 200 μL of 20% methanol in water. The samples are eluted with consecutive 100 μL volumes of 5/20/75 formic acid/water/methanol and 100 μL 5/15/80 formic acid/water/methanol. The samples are dried under nitrogen and resuspended in 100 μL of 20% methanol in water. Samples are analyzed by a Waters Quattro Micro mass spectrometer coupled to a Waters 1525 binary pump with a Waters 2777 autosampler. A 40 μL volume of each sample is injected onto a Thermo Hypersil GOLD C18 column (2.1×50 mm, 5 um). polypeptide is eluted by a gradient over 3 minutes with acetonitrile and water containing 0.05% trifluoroacetic acid. The Quattro Micro mass spectrometer is run in multiple reaction monitoring (MRM) mode using the mass transitions of, for example 764>182 or 682>136. Using this methodology, polypeptide is dosed orally and by IV to rats at 10 mg/kg. Pharmacokinetic properties including area under the curve and bioavailability are determined.

[0433] Determination of In Vitro Proteolytic Stability

[0434] Polypeptide/GC-C agonists described herein are exposed to a variety of in vitro conditions including digestive enzymes and low ph environments designed to simulate gastric fluid. Polypeptide/GC-C agonists described herein are incubated with chymotrypsin, trypsin, pepsin, aminopeptidase, carboxypeptidase A, and simulated gastric fluid (sgf) at ph 1.0. Samples are collected at 0, 3, and 24 h for all conditions except pepsin digestion and the SGF. For the latter two conditions, samples are obtained at 0, 1, and 3 h. Negative control samples are prepared for initial and final time points. A separate, positive activity control is run in parallel for each condition. All samples are analyzed by LC/MS.

[0435] Additional methods for confirming and/or determining the biological activity of the peptides described herein are provided by Currie et al., (Publication No. WO2007/002971) and in the Examples.

### EXAMPLES

[0436] The disclosure is further described in the following examples, which do not limit the scope of the disclosure described in the claims.

### Example 1

### Design and Construction of DNA Encoding Human Pro-M-Uroguanylin

[0437] FIGS. 1 and 3 show the unmodified nucleotide and amino acid sequence of human pro-uroguanylin (huProUGN). huProUGN differs from human pro-M-uroguanylin (huProMUGN) because the latter contains a single methionine residue inserted into the huProUGN sequence, as shown in FIGS. 2 and 5. This methionine residue facilitates cyanogen bromide (CNBr) cleavage of the peptide. In huProMUGN, the methionine residue is inserted between the pro and mature uroguanylin sequences. Insertion of the methionine residue at this position is expected to yield pre and mature UGN sequences following CNBr cleavage.

[0438] A DNA construct encoding huProMUGN was synthesized by Blue Heron Biotechnology (Bothell, Wash.). As shown in FIG. 5, in addition to the methionine residue described above, huProMUGN includes a nucleotide sequence encoding a PreScission3 protease amino acid recognition site (LEVLFQGP (SEQ ID NO: 25); GE Healthcare) located at the five prime terminus. The PreScission3 site was included to facilitate cleavage of the huProMUGN sequence from any upstream molecules, e.g., fusion proteins.

[0439] huProMUGN DNA was then cloned into pUC119 (Vierra and Messing, Methods in Enzymology, 153:3-11, 1997) without the use of a cloning site. BglII and HindIII restriction endonuclease sites were then inserted at the five and three prime terminals of the huProMUGN coding sequence, respectively, and a XbaI restriction enzyme recognition site was inserted close to the three prime end of the huProMUGN DNA sequence. Sequences were validated throughout each of the cloning steps above using sequence analysis. The complete huProMUGN DNA construct and translated amino acid sequence is shown in FIG. 5 and is designated as TP26 (BlueHeron clone CCN 57126).

[0440] The huProMUGN coding region was excised from TP26 and cloned into pET32b (Novagen) using BglII and HindIII restriction enzymes to digest TP26 and pET32b. This strategy resulted in the deletion of the enterokinase cleavage present in pET32b, but left the TrxTag, the HisTag, the thrombin site, and the S-tag intact and inframe with the huProMUGN. The resulting vector was designated pTM202.

[0441] The 247 amino acid Trx-huProMUGN fusion peptide that results from the expression of pTM202 is shown schematically in FIG. 6.

### Example 2

### Recombinant Protein Expression and Purification

[0442] pTM202 was transformed into Escherichia coli Origami (DE3), according to the manufacturer′s instructions (Novagen). The resulting cell line was designated pTM202/DE3. A starter culture containing 3 mL Luria-Bertani (LB) broth supplemented with 50 Tg/mL ampicillin was inoculated with pTM202/DE3 and cultured over night at 37° C. The starter culture was then used to inoculate 250 mL of LB supplemented with 50 Tg/mL ampicillin. These cultures were then grown to an OD₆₀₀ of about 0.5 at 37° C., before the incubation temperature was decreased to 25° C. Protein expression was then induced by the addition of isopropyl-beta-D-thiogalactopyranoside (IPTG) to a final concentration of 1 mM. These conditions were maintained for four hours. Cells were then harvested by centrifugation. Cell pellets were frozen overnight at −80° C. The cell pellet was thawed and resuspended in 10 mL buffer A (20 mM Tris-HCL, pH 8.0, 150 mM NaCl) supplemented with 0.2 mg/mL lysozyme and EDTA-free protease inhibitor (Roche Applied Science, Mannheim, Germany) per gram wet cell weight. The cells were then lysed using three 60 s sonication steps, and the soluble fraction was extracted by centrifugation for 45 min at 37,000×g at 4° C. in a Sorvall SA-600 rotor.

[0443] His-tagged fusion proteins were purified from the soluble fraction using a TALON metal affinity column. Briefly, the soluble fraction was loaded onto a 2.5 mL bed volume TALON metal affinity column (Clontech, Palo Alto, Calif.) pre-equilibrated with buffer A. The column was then washed with 10 bed volumes of buffer B (20 mM Tris-HCL, pH 8.0, 500 mM NaCl), followed by 3 bed volumes of buffer B containing 5 mM imidazole. The recombinant protein was then eluted with buffer A containing 150 mM imidazole. The eluate was desalted and concentrated using an Amicon Centriprep centrifugal filter unit (Millipore, Billerica, Mass.) to a final volume of 1 mL.

[0444] Purified recombinant proteins were then treated with 100 units of PreScission3 protease at 4° C. to remove the upstream fusion proteins (TrxA, His, and S tags). The cleavage reaction was monitored throughout by running aliquots of the digest mixture on an SDS-PAGE gel, as shown in FIG. 7.

[0445] Following sufficient digestion, the digest mixture was loaded onto a 250 TL bed volume glutathione sepharose 4B column (GE Healthcare, Uppsala, Sweden) pre-equilibrated with buffer A to remove the PreScission protease. The flow-through was collected and loaded onto the TALON metal affinity column a second time to remove the thioredoxin tag and uncleaved fusion proteins. Purified huProMUGN was collected in the flow-through, as shown in FIG. 6, lane 4.

### Example 3

### Generation of Mature UGN Peptide

[0446] The concentration of purified huProMUGN was determined using the Bradford Assay. A 100-fold molar excess of CNBr was then added to 100 TL of protein. Following an overnight incubation at room temperature, the digest mixture was dried at 55° C. and resuspended in 100 TL of 100 mM Tris-HCl, pH 8.0.

[0447] The activity of the mature peptide was evaluated by the production of intracellular cGMP using cultured human colon carcinoma T84 cells, as described by Currie et al. (Pro. Natl. Acad. Sci. USA., 89:947-951, 1992). cGMP levels were subsequently measured using a cGMP ELISA kit (Cayman Chemical, Ann Arbor, Mich.) according to the manufacturer's protocol. Synthetic human uroguanylin (Sigma-Aldrich, St. Louis, Mo.) was assayed alongside as a comparison.

[0448] As shown in FIG. 8, cGMP levels produced by the mature UGN peptide were comparable to those levels produced using synthetic human UGN.

### Other Cases

[0449] It is to be understood that while the disclosure has been described in conjunction with the detailed description thereof, the foregoing description is intended to illustrate and not limit the scope of the disclosure, which is defined by the scope of the appended claims. Other aspects, advantages, and modifications are within the scope of the following claims.

1-110. (canceled)

111. A nucleic acid molecule comprising a nucleotide sequence encoding a polypeptide comprising the amino acid sequence:
A-B-C-D-E, wherein:
A comprises a GC-C receptor binding polypeptide presequence or is missing
B is one or more methionine residues or is missing;
C comprises a GC-C receptor binding polypeptide prosequence or is missing;
D is one or more methionine residues or is missing; and
E comprises a GC-C receptor binding polypeptide.

112. The nucleic acid molecule according to claim 111, wherein the polypeptide comprises an amino acid sequence selected from:
A-B-C-D-E,
B-C-D-E,
A-C-D-E,
A-B-C-E,
C-D-E,
A-B-E, and
D-E;
wherein:
A comprises a GC-C receptor binding polypeptide presequence;
B is one or more methionine residues;
C comprises a GC-C receptor binding polypeptide prosequence;
D is one or more methionine residues; and
E comprises a GC-C receptor binding polypeptide.

113. The nucleic acid molecule of claim 111, wherein B, when present, is one methionine.

114. The nucleic acid molecule of claim 111, wherein D, when present, is one methionine.

115. The nucleic acid molecule of claim 111, wherein A, when present, comprises a sequence selected from SEQ ID NO:17, SEQ ID NO:18, SEQ ID NO:19, SEQ ID NO:20, SEQ ID NO:21, SEQ ID NO:22, or a presequence depicted in FIG. 9 or FIG. 10.

116. The nucleic acid molecule of claim 111, wherein C, when present, comprises a sequence chosen from a prosequence depicted in FIG. 9 or FIG. 10, SEQ ID NO:11, SEQ ID NO:12, SEQ ID NO:13, or SEQ ID NO:15933.

117. The nucleic acid molecule of claim 111, wherein E comprises a sequence selected from: a processed active peptide (mature) sequence depicted in FIG. 10, SEQ ID NO:9, SEQ ID NO:10, SEQ ID NO:14; SEQ ID NO:199; SEQ ID NO:15933; SEQ ID NO:15, or SEQ ID NO:16.

118. The nucleic acid molecule of claim 111, wherein E comprises a sequence chosen from the group consisting of SEQ ID NOs: 27-33, 34-59, 63-162, and 805.

119. The nucleic acid molecule of claim 118 wherein E is selected from SEQ ID NOs: 63, 64, and 805.

120. The nucleic acid molecule of claim 111 wherein E comprises
E1-E2-E3, wherein
E1 is an N-terminal non-core sequence in FIG. 9, or is missing;
E2 is an active “core” sequence in FIG. 9; and
E3 is a C-terminal non-core sequence in FIG. 9, or is missing.

121. The nucleic acid molecule of claim 120 wherein E is selected from
E1-E2-E3,
E1-E2,
E2-E3, and
E2
wherein
E1 is an N-terminal non-core sequence in FIG. 9;
E2 is an active “core” sequence in FIG. 9; and
E3 is a C-terminal non-core sequence in FIG. 9.

122. The nucleic acid molecule of claim 111 wherein E comprises
E1-E1′-E2-E3, wherein
E1 is an N-terminal non-core sequence in FIG. 9;
E1′ is one or more methionine residues;
E2 is an active “core” sequence in FIG. 9; and
E3 is a C-terminal non-core sequence in FIG. 9.

123. The nucleic acid molecule of claim 122 wherein E1′ is one methionine residue.

124. The nucleic acid molecule of claim 111 wherein E comprises a sequence chosen from a sequence depicted in FIG. 10.

125. The nucleic acid molecule of claim 111 wherein E comprises a sequence selected from SEQ ID NOs:1629-5000; SEQ ID NOs:5001-9000; SEQ ID NOs:9001-13000; and SEQ ID NOs:13001-15933.

126. A nucleic acid molecule comprising a nucleotide sequence encoding a polypeptide comprising the amino acid sequence: Z₂-Z₃, wherein:
Z₂ is one or more methionine residues; and
Z₃ comprises SEQ ID NO:9, SEQ ID NO:10, SEQ ID NO:15, or SEQ ID NO:16.

127. The nucleic acid molecule of claim 126, wherein Z₃ consists of a sequence of SEQ ID NO:16.

128. The nucleic acid molecule of claim 126, wherein the polypeptide further comprises Z₀ or Z₁ or both, wherein:
Z₀ is SEQ ID NO:17, SEQ ID NO:18, SEQ ID NO:19, SEQ ID NO:20, SEQ ID NO:21, SEQ ID NO:22, a pre sequence depicted in FIG. 9, or is missing; and
Z₁ comprises SEQ ID NO:11, SEQ ID NO:12, SEQ ID NO:13, or SEQ ID NO:15933, a pro sequence depicted in FIG. 9, or is missing.

129. The nucleic acid molecule of claim 128, wherein the polypeptide is selected from
Z₁-Z₂-Z₃,
Z₀-Z₂-Z₃,
Z₀-Z₁-Z₂-Z₃,
Z₀-Z₂-Z₁-Z₂-Z₃, and
Z₀-Z₂-Z₁-Z₃,
wherein:
Z₀ is SEQ ID NO:17, SEQ ID NO:18, SEQ ID NO:19, SEQ ID NO:20, SEQ ID NO:21, SEQ ID NO:22, a pre sequence depicted in FIG. 9, or is missing; and
Z₁ comprises SEQ ID NO:11, SEQ ID NO:12, SEQ ID NO:13, or SEQ ID NO:15933, a pro sequence depicted in FIG. 9, or is missing;
Z₂ is one or more methionine residues; and
Z₃ comprises SEQ ID NO:9, SEQ ID NO:10, SEQ ID NO:15, or SEQ ID NO:16.

130. A nucleic acid molecule comprising a nucleotide sequence encoding a polypeptide comprising the amino acid sequence:
A′-B′-Z₂-D′,
wherein:
A′ is an amino acid sequence comprising a pre sequence depicted in FIG. 9, or is missing;
B′ is an amino acid sequence comprising a pro sequence depicted in FIG. 9, or is missing;
Z₂ is one or more methionine residues, and
D′ is an amino acid sequence selected from the group consisting of SEQ ID NOs:63-1629, or an active core sequence depicted in FIG. 9.

131. The nucleic acid of claim 130, where the nucleotide sequence encoding a polypeptide comprising the amino acid sequence selected from:
A′-Z₂-D′,
B′-Z₂-D′, and
Z₂-D′
wherein:
A′ is an amino acid sequence comprising a pre sequence depicted in FIG. 9 or is missing;
B′ is an amino acid sequence comprising a pro sequence depicted in FIG. 9 or is missing;
Z₂ is one or more methionine residues; and
D′ is an amino acid sequence selected from the group consisting of SEQ ID NOs:63-1629, or an active core sequence depicted in FIG. 9.

132. A nucleic acid molecule comprising a nucleotide sequence encoding a polypeptide comprising any of the amino acid sequences of Table 3, wherein
A′ is an amino acid sequence comprising a pre sequence depicted in FIG. 9;
B′ is an amino acid sequence comprising a pro sequence depicted in FIG. 9;
each Z₂ is one or more methionine residues; and
D′ is an amino acid sequence selected from the group consisting of SEQ ID NOs:63-1629, or an active core sequence depicted in FIG. 9.

133. The nucleic acid molecule of claim 132 further comprising amino acid sequences of C′, or E′, or both, wherein C′, if present, is located between Z₂ and D′ and E′, if present, is located adjacent to and following D′.

134. The nucleic acid molecule of claim 133, wherein C′ is an amino acid sequence comprising an amino-terminal non-core sequence depicted in FIG. 9 or E′ is an amino acid sequence comprising an carboxy-terminal non-core sequence depicted in FIG. 9.

135. The nucleic acid molecule of claim 132, wherein D′ is selected from SEQ ID NOs: 63, 64, and 805.

136. A nucleic acid molecule comprising a nucleotide sequence encoding a polypeptide comprising an amino acid sequence selected from SEQ ID NOs: 7 and 8.

137. A nucleic acid molecule comprising a nucleotide sequence selected from SEQ ID NOs: 24, 2, and 4.

138. The nucleic acid molecule of claim 136, wherein the polypeptide comprises an affinity tag located at the amino-terminus and/or the carboxy-terminus of the polypeptide.

139. The nucleic acid molecule of claim 138, wherein the polypeptide and the affinity tag are adjacent to each other.

140. The nucleic acid molecule of claim 138, wherein the polypeptide and the affinity tag are separated by a protease recognition site.

141. The nucleic acid molecule of claim 137, further comprising a nucleic acid sequence encoding an affinity tag located at the 5′ or 3′ terminus of the nucleic acid molecule.

142. The nucleic acid molecule of claim 141, further comprising a nucleic acid sequence encoding a protease recognition site.

143. An expression vector comprising a nucleic acid molecule of claim 111.

144. The expression vector of claim 143, wherein the nucleic acid molecules is operably linked to a promoter capable of driving expression of the nucleic acid molecule in a cell.

145. The expression vector of claim 144, further comprising an internal ribosome entry site.

146. The expression vector of claim 143, wherein the expression vector is a DNA vector.

147. The expression vector of claim 143, wherein the expression vector is pET32b.

148. A polypeptide encoded by a nucleic acid molecule of claim 132.

149. A recombinant cell comprising a nucleic acid molecule of claim 111.

150. A recombinant cell comprising the expression vector of claim 143.

151. A method of making a polypeptide capable of binding to and/or activating the guanylate cyclase (GC-C) receptor, the method comprising obtaining a polypeptide of claim 148 and cleaving the polypeptide at the carboxy terminal to one or more methionine residues.

152. The method of claim 151, wherein the step of cleaving the polypeptide comprises contacting the polypeptide with cyanogen bromide.

153. The method of claim 151, wherein the polypeptide capable of binding to and/or activating the guanylate cyclase (GC-C) receptor is purified.

The application's sequence listing, which the Patent Office published only in electronic form, follows.

SEQUENCE LISTING (15933 sequences)

SEQ ID NO: 1 - DNA, 596 bp, Homo sapiens
gacagcgcagggggaacccagggagcgcgatgggctgcagggctgcgtcagggctcctgccaggagtggccgtggtcctcctgctgctgctgcagagcacacagtcagtctacatccagtaccaaggcttccgggtccagctggaatccatgaagaagctgagtgacctggaggcacagtgggcacccagcccccgcctgcaggcccagagcctcctgcccgccgtgtgccaccaccctgctctgcctcaggaccttcagcctgtctgcgcctcgcaggaggcttccagcatcttcaagaccctgaggaccatcgctaacgacgactgtgagctgtgtgtgaacgttgcgtgtaccggctgcctctgagatagccctgggtaccctgagcccaccagggacacctcgcccttcagcccaccaccctggcaggcttccatccccgtccatgctcaagatgggtccctggccaccatggtcatcaccacccttccagggcctgagcagctggatctggtacaaagcaatcggacatagagttggagggggaggcccctgaggcagcccagctcctgaataaagattctacaacacacg

SEQ ID NO: 2 - DNA, 536 bp, Homo sapiens
caggagtggccgtggtcctcctgctgctgctgcagagcacacagtcagtctacatccagtaccaaggcttccgggtccagctggaatccatgaagaagctgagtgacctggaggcacagtgggcacccagcccccgcctgcaggcccagagcctcctgcccgccgtgtgccaccaccctgctctgcctcaggaccttcagcctgtctgcgcctcgcaggaggcttccagcatcttcaagaccctgaggaccatcgctaacgacgactgtgagctgtgtgtgaacgttgcgtgtaccggctgcctctgagatagccctgggtaccctgagcccaccagggacacctcgcccttcagcccaccaccctggcaggcttccatccccgtccatgctcaagatgggtccctggccaccatggtcatcaccacccttccagggcctgagcagctggatctggtacaaagcaatcggacatagagttggagggggaggcccctgaggcagcccagctcctgaataaagattctacaacacacg

SEQ ID NO: 3 - DNA, 571 bp, Homo sapiens
tcgctgccatgaatgccttcctgctcttcgcactgtgcctccttggggcctgggccgccttggcaggaggggtcaccgtgcaggatggaaatttctccttttctctggagtcagtgaagaagctcaaagacctccaggagccccaggagcccagggttgggaaactcaggaactttgcacccatccctggtgaacctgtggttcccatcctctgtagcaacccgaactttccagaagaactcaagcctctctgcaaggagcccaatgcccaggagatacttcagaggctggaggaaatcgctgaggacccgggcacatgtgaaatctgtgcctacgctgcctgtaccggatgctaggggggcttgcccactgcctgcctcccctccgcagcagggaagctcttttctcctgcagaaagggccacccatgatactccactcccagcagctcaacctaccctggtccagtcgggaggagcagcccggggaggaactgggtgactggaggcctcgccccaacactgtccttccctgccacttcaacccccagctaataaaccagattccagagt

SEQ ID NO: 4 - DNA, 351 bp, Homo sapiens
atgaatgccttcctgctcttcgcactgtgcctccttggggcctgggccgccttggcaggaggggtcaccgtgcaggatggaaatttctccttttctctggagtcagtgaagaagctcaaagacctccaggagccccaggagcccagggttgggaaactcaggaactttgcacccatccctggtgaacctgtggttcccatcctctgtagcaacccgaactttccagaagaactcaagcctctctgcaaggagcccaatgcccaggagatacttcagaggctggaggaaatcgctgaggacatgccgggcacatgtgaaatctgtgcctacgctgcctgtaccggatgctag

SEQ ID NO: 5 - protein, 86 aa, Artificial Sequence
  Synthetically generated peptide
VYIQYQGFRVQLESMKKLSDLEAQWAPSPRLQAQSLLPAVCHHPALPQDLQPVCASQEASSIFKTLRTIANDDCELCVNVACTGCL

SEQ ID NO: 6 - protein, 94 aa, Artificial Sequence
  Synthetically generated peptide
VTVQDGNFSFSLESVKKLKDLQEPQEPRVGKLRNFAPIPGEPVVPILCSNPNFPEELKPLCKEPNAQEILQRLEEIAEDPGTCEICAYAACTGC

SEQ ID NO: 7 - protein, 88 aa, Artificial Sequence
  Synthetically generated peptide
VYIQYQGFRVQLESMKKLSDLEAQWAPSPRLQAQSLLPAVCHHPALPQDLQPVCASQEASSIMFKTLRTIAMNDDCELCVNVACTGCL

SEQ ID NO: 8 - protein, 95 aa, Artificial Sequence
  Synthetically generated peptide
VTVQDGNFSFSLESVKKLKDLQEPQEPRVGKLRNFAPIPGEPVVPILCSNPNFPEELKPLCKEPNAQEILQRLEEIAEDMPGTCEICAYAACTGC

SEQ ID NO: 9 - protein, 16 aa, Artificial Sequence
  Synthetically generated peptide
NDDCELCVNVACTGCL

SEQ ID NO: 10 - protein, 16 aa, Artificial Sequence
  Synthetically generated peptide
  misc_feature (1)..(1): Xaa can be any naturally occurring amino acid
  misc_feature (3)..(3): Xaa can be any naturally occurring amino acid
  misc_feature (8)..(8): Xaa can be any naturally occurring amino acid
XDXCELCXNVACTGCL

SEQ ID NO: 11 - protein, 70 aa, Artificial Sequence
  Synthetically generated peptide
VYIQYQGFRVQLESMKKLSDLEAQWAPSPRLQAQSLLPAVCHHPALPQDLQPVCASQEASSIFKTLRTIA

SEQ ID NO: 12 - protein, 71 aa, Artificial Sequence
  Synthetically generated peptide
  misc_feature (2)..(2): Xaa can be any naturally occurring amino acid
  misc_feature (4)..(4): Xaa can be any naturally occurring amino acid
  misc_feature (6)..(6): Xaa can be any naturally occurring amino acid
  misc_feature (8)..(9): Xaa can be any naturally occurring amino acid
  misc_feature (11)..(11): Xaa can be any naturally occurring amino acid
  misc_feature (13)..(13): Xaa can be any naturally occurring amino acid
  misc_feature (15)..(15): Xaa can be any naturally occurring amino acid
  misc_feature (17)..(17): Xaa can be any naturally occurring amino acid
  misc_feature (19)..(20): Xaa can be any naturally occurring amino acid
  misc_feature (22)..(41): Xaa can be any naturally occurring amino acid
  misc_feature (43)..(45): Xaa can be any naturally occurring amino acid
  misc_feature (49)..(49): Xaa can be any naturally occurring amino acid
  misc_feature (52)..(52): Xaa can be any naturally occurring amino acid
  misc_feature (54)..(54): Xaa can be any naturally occurring amino acid
  misc_feature (56)..(66): Xaa can be any naturally occurring amino acid
  misc_feature (69)..(71): Xaa can be any naturally occurring amino acid
VXIXYXGXXVXLXSXKXLXXLXXXXXXXXXXXXXXXXXXXXCXXXALPXDLXPXCXXXXXXXXXXXLRXXX

SEQ ID NO: 13 - protein, 79 aa, Artificial Sequence
  Synthetically generated peptide
VTVQDGNFSFSLESVKKLKDLQEPQEPRVGKLRNFAPIPGEPVVPILCSNPNFPEELKPLCKEPNAQEILQRLEEIAED

SEQ ID NO: 14 - protein, 24 aa, Artificial Sequence
  Synthetically generated peptide
FKTLRTIANDDCELCVNVACTGCL

SEQ ID NO: 15 - protein, 16 aa, Artificial Sequence
  Synthetically generated peptide
PGTCEICAYAACTGCF

SEQ ID NO: 16 - protein, 16 aa, Artificial Sequence
  Synthetically generated peptide
  misc_feature (2)..(3): Xaa can be any naturally occurring amino acid
  misc_feature (9)..(9): Xaa can be any naturally occurring amino acid
  misc_feature (13)..(13): Xaa can be any naturally occurring amino acid
  misc_feature (16)..(16): Xaa can be any naturally occurring amino acid
PXXCEICAXAACXGCX

SEQ ID NO: 17 - protein, 100 aa, Artificial Sequence
  Synthetically generated peptide
MNAFLLSALCLLGAWAALAGGVTVQDGNFSFSLESVKKLKDLQEPQEPRVGKLRNFAPIPGEPVVPILCSNPNFPEELKPLCKEPNAQEILQRLEEIAED

SEQ ID NO: 18 - protein, 96 aa, Artificial Sequence
  Synthetically generated peptide
MGCRAASGLLPGVAVVLLLLLQSTQSVYIQYQGFRVQLESMKKLSDLEAQWAPSPRLQAQSLLPAVCHHPALPQDLQPVCASQEASSIFKTLRTIA

SEQ ID NO: 19 - protein, 5 aa, Artificial Sequence
  Synthetically generated peptide
LRTIA

SEQ ID NO: 20 - protein, 100 aa, Artificial Sequence
  Synthetically generated peptide
MNAWLLSVLCLLGALAVLVEGVTVQDGDLSFPLESVKQLKHLREVQEPTLMSHKKFALRLPKPVAPELCSQSAFPEALRPLCEKPNAEEILQRLEAIAQD

SEQ ID NO: 21 - protein, 91 aa, Artificial Sequence
  Synthetically generated peptide
MSGSQLWAAVLLLLVLQSAQGVYIKYHGFQVQLESVKKLNELEEKQMSDPQQQKSGLLPDVCYNPALPLDLQPVCASQEAASTFKALRTIA

SEQ ID NO: 22 - protein, 54 aa, Artificial Sequence
  Synthetically generated peptide
MKKSILFIFLSVLSFSPFAQDAKPVESSKEKITLESKKCNIAKKSNKSGPESMN

SEQ ID NO: 23 - DNA, 300 bp, Artificial Sequence
  Synthetically generated DNA sequence
ccagatctgggtctggaagttctgttccagggtccggtctacatccagtacccaggcttccgcgtccagctggaatccatgaaaaaactgagtgatctggaggcacagtgggcaccgagcccgcgcctgcaggcccagagcctgctgccggccgtgtgccaccacccggctctgccgcaggatctgcagccggtctgcgcctcgcaggaggcttccagcatcttcaaaaccctgcgcaccatcgctatgaacgatgattgtgagctgtgtgtgaacgttgcgtgtaccggctgcctgtaa

SEQ ID NO: 24 - protein, 99 aa, Artificial Sequence
  Synthetically generated peptide
PDLGLEVLFQGPVYIQYQGFRVQLESMKKLSDLEAQWAPSPRLQAQSLLPAVCHHPALPQDLQPVCASQEASSIFKTLRTIAMNDDCELCVNVACTGCL

SEQ ID NO: 25 - protein, 8 aa, Artificial Sequence
  Synthetically generated peptide
LEVLFQGP

SEQ ID NO: 26 - protein, 5 aa, Artificial Sequence
  Synthetically generated peptide
DDDDK

SEQ ID NO: 27 - protein, 30 aa, Artificial Sequence
  Synthetically generated peptide
QACDPPSPPAEVSSDWDCCDVCCNPACAGC

SEQ ID NO: 28 - protein, 6 aa, Artificial Sequence
  Synthetically generated peptide
LVPRGS

SEQ ID NO: 29 - protein, 30 aa, Artificial Sequence
  Synthetically generated peptide
KACDTQTPSPSEENDDWCCEVCCNPACAGC

SEQ ID NO: 30 - protein, 53 aa, Artificial Sequence
  Synthetically generated peptide
QETASGQVGDVSSSTIATEVSEAECGTQSATTQGENDWDWCCELCCNPACFGC

SEQ ID NO: 31 - protein, 16 aa, Artificial Sequence
  Synthetically generated peptide
SDWCCEVCCNPACAGC

SEQ ID NO: 32 - protein, 17 aa, Artificial Sequence
  Synthetically generated peptide
IDCCEICCNPACFGCLN

SEQ ID NO: 33 - protein, 17 aa, Artificial Sequence
  Synthetically generated peptide
IDCCEICCNPACFGCLN

SEQ ID NO: 34 - protein, 19 aa, Artificial Sequence
  Synthetically generated peptide
NSSNYCCELCCNPACTGCY

SEQ ID NO: 35 - protein, 18 aa, Artificial Sequence
  Synthetically generated peptide
NTFYCCELCCNPACAGCY

SEQ ID NO: 36 - protein, 18 aa, Artificial Sequence
  Synthetically generated peptide
NTFYCCELCCNPACAPCY

SEQ ID NO: 37 - protein, 18 aa, Artificial Sequence
  Synthetically generated peptide
NTFYCCELCCYPACAGCN

SEQ ID NO: 38 - protein, 17 aa, Artificial Sequence
  Synthetically generated peptide
IDCCEICCNPACFGCLN

SEQ ID NO: 39 - protein, 17 aa, Artificial Sequence
  Synthetically generated peptide
IDCCEICCNPACFGCLN

SEQ ID NO: 40 - protein, 13 aa, Artificial Sequence
  Synthetically generated peptide
IDCCEICCNPACF

SEQ ID NO: 41 - protein, 14 aa, Artificial Sequence
  Synthetically generated peptide
IDCCEICCNPACFG

SEQ ID NO: 42 - protein, 17 aa, Artificial Sequence
  Synthetically generated peptide
IDCCEICCNPACFGCLN

SEQ ID NO: 43 - protein, 17 aa, Artificial Sequence
  Synthetically generated peptide
IDRCEICCNPACFGCLN

SEQ ID NO: 44 - protein, 16 aa, Artificial Sequence
  Synthetically generated peptide
DWDCCDVCCNPACAGC

SEQ ID NO: 45 - protein, 16 aa, Artificial Sequence
  Synthetically generated peptide
DWDCCDVCCNPACAGC

SEQ ID NO: 46 - protein, 17 aa, Artificial Sequence
  Synthetically generated peptide
NDDWCCEVCCNPACAGC

SEQ ID NO: 47 - protein, 16 aa, Artificial Sequence
  Synthetically generated peptide
WDWCCELCCNPACFGC

SEQ ID NO: 48 - protein, 16 aa, Artificial Sequence
  Synthetically generated peptide
SDWCCEVCCNPACAGC

SEQ ID NO: 49 - protein, 30 aa, Artificial Sequence
  Synthetically generated peptide
QACDPPSPPAEVSSDWDCCDVCCDPACAGC

SEQ ID NO: 50 - protein, 30 aa, Artificial Sequence; identical to SEQ ID NO: 27
  Synthetically generated peptide

SEQ ID NO: 51 - protein, 30 aa, Artificial Sequence
  Synthetically generated peptide
KACDTQTPSPSEENDDTCCEVCCNPACAGC

SEQ ID NO: 52 - protein, 53 aa, Artificial Sequence; identical to SEQ ID NO: 30
  Synthetically generated peptide

SEQ ID NO: 53 - protein, 72 aa, Artificial Sequence
  Synthetically generated peptide
MKKLMLAIFISVLSFPSFSQSTESLDSSKEKITLETKKCDVVKNNSEKKSENMNNTFYCCELCCNPACAGCY

SEQ ID NO: 54 - protein, 72 aa, Artificial Sequence
  Synthetically generated peptide
MKKSILFIFLSVLSFSPFAQDAKPVESSKEKITLESKKCNIAKKSNKSGPESMNSSNYCCELCCNPACTGCY

SEQ ID NO: 55 - protein, 71 aa, Artificial Sequence
  Synthetically generated peptide
MKKIVFVLVLMLSSFGAFGQETVSGQFSDALSTPITAEVYKQACDPPLPPAEVSSDWDCCDVCCNPACAGC

SEQ ID NO: 56 - protein, 20 aa, Artificial Sequence
  Synthetically generated peptide
GNLIDCCEICCNPACFGCLN

SEQ ID NO: 57 - protein, 20 aa, Artificial Sequence
  Synthetically generated peptide
GNLIDRCEICCNPACFGCLN

SEQ ID NO: 58 - protein, 23 aa, Artificial Sequence
  Synthetically generated peptide
PPAEVSSDWDCCDVCCNPACAGC

SEQ ID NO: 59 - protein, 16 aa, Artificial Sequence
  Synthetically generated peptide
NYCCELCCNPACTGCF

SEQ ID NO: 60 - protein, 72 aa, Artificial Sequence; identical to SEQ ID NO: 53
  Synthetically generated peptide

SEQ ID NO: 61 - protein, 72 aa, Artificial Sequence; identical to SEQ ID NO: 54
  Synthetically generated peptide

SEQ ID NO: 62 - protein, 71 aa, Artificial Sequence; identical to SEQ ID NO: 55
  Synthetically generated peptide

SEQ ID NO: 63 - protein, 21 aa, Artificial Sequence
  Synthetically generated peptide
  misc_feature (1)..(5): Xaa can be any naturally occurring amino acid
  misc_feature (8)..(9): Xaa can be any naturally occurring amino acid
  misc_feature (12)..(14): Xaa can be any naturally occurring amino acid
  misc_feature (16)..(17): Xaa can be any naturally occurring amino acid
  misc_feature (19)..(21): Xaa can be any naturally occurring amino acid
XXXXXCCXXCCXXXCXXCXXX

SEQ ID NO: 64 - protein, 21 aa, Artificial Sequence
  Synthetically generated peptide
  misc_feature (1)..(5): Xaa can be any naturally occurring amino acid
  misc_feature (8)..(9): Xaa can be any naturally occurring amino acid
  misc_feature (16)..(16): Xaa can be any naturally occurring amino acid
  misc_feature (19)..(21): Xaa can be any naturally occurring amino acid
XXXXXCCXXCCNPACXGCXXX

SEQ ID NO: 65 - protein, 13 aa, Artificial Sequence
  Synthetically generated peptide
CCEACCNPACTGC

SEQ ID NO: 66 - protein, 13 aa, Artificial Sequence
  Synthetically generated peptide
CCERCCNPACTGC

SEQ ID NO: 67 - protein, 13 aa, Artificial Sequence
  Synthetically generated peptide
CCENCCNPACTGC

SEQ ID NO: 68 - protein, 13 aa, Artificial Sequence
  Synthetically generated peptide
CCEDCCNPACTGC

SEQ ID NO: 69 - protein, 13 aa, Artificial Sequence
  Synthetically generated peptide
CCECCCNPACTGC

SEQ ID NO: 70 - protein, 13 aa, Artificial Sequence
  Synthetically generated peptide
CCEQCCNPACTGC

SEQ ID NO: 71 - protein, 13 aa, Artificial Sequence
  Synthetically generated peptide
CCEECCNPACTGC

SEQ ID NO: 72 - protein, 13 aa, Artificial Sequence
  Synthetically generated peptide
CCEGCCNPACTGC

SEQ ID NO: 73 - protein, 13 aa, Artificial Sequence
  Synthetically generated peptide
CCEHCCNPACTGC

SEQ ID NO: 74 - protein, 13 aa, Artificial Sequence
  Synthetically generated peptide
CCEICCNPACTGC

SEQ ID NO: 75 - protein, 13 aa, Artificial Sequence
  Synthetically generated peptide
CCEKCCNPACTGC

SEQ ID NO: 76 - protein, 13 aa, Artificial Sequence
  Synthetically generated peptide
CCEMCCNPACTGC

SEQ ID NO: 77 - protein, 13 aa, Artificial Sequence
  Synthetically generated peptide
CCEFCCNPACTGC

SEQ ID NO: 78 - protein, 13 aa, Artificial Sequence
  Synthetically generated peptide
CCEPCCNPACTGC

SEQ ID NO: 79 - protein, 13 aa, Artificial Sequence
  Synthetically generated peptide
CCESCCNPACTGC

SEQ ID NO: 80 - protein, 13 aa, Artificial Sequence
  Synthetically generated peptide
CCETCCNPACTGC

SEQ ID NO: 81 - protein, 13 aa, Artificial Sequence
  Synthetically generated peptide
CCEWCCNPACTGC

SEQ ID NO: 82 - protein, 13 aa, Artificial Sequence
  Synthetically generated peptide
CCEVCCNPACTGC

SEQ ID NO: 83 - protein, 13 aa, Artificial Sequence
  Synthetically generated peptide
CCEYCCNPACTGC

SEQ ID NO: 84 - protein, 13 aa, Artificial Sequence
  Synthetically generated peptide
CCELCCNPACTGC

SEQ ID NO: 85 - protein, 14 aa, Artificial Sequence
  Synthetically generated peptide
CCEACCNPACTGCY

SEQ ID NO: 86 - protein, 14 aa, Artificial Sequence
  Synthetically generated peptide
CCERCCNPACTGCY

SEQ ID NO: 87 - protein, 14 aa, Artificial Sequence
  Synthetically generated peptide
CCENCCNPACTGCY

SEQ ID NO: 88 - protein, 14 aa, Artificial Sequence
  Synthetically generated peptide
CCEDCCNPACTGCY

SEQ ID NO: 89 - protein, 14 aa, Artificial Sequence
  Synthetically generated peptide
CCECCCNPACTGCY

SEQ ID NO: 90 - protein, 14 aa, Artificial Sequence
  Synthetically generated peptide
CCEQCCNPACTGCY

SEQ ID NO: 91 - protein, 14 aa, Artificial Sequence
  Synthetically generated peptide
CCEECCNPACTGCY

SEQ ID NO: 92 - protein, 14 aa, Artificial Sequence
  Synthetically generated peptide
CCEGCCNPACTGCY

SEQ ID NO: 93 - protein, 14 aa, Artificial Sequence
  Synthetically generated peptide
CCEHCCNPACTGCY

SEQ ID NO: 94 - protein, 14 aa, Artificial Sequence
  Synthetically generated peptide
CCEICCNPACTGCY

SEQ ID NO: 95 - protein, 14 aa, Artificial Sequence
  Synthetically generated peptide
CCEKCCNPACTGCY

SEQ ID NO: 96 - protein, 14 aa, Artificial Sequence
  Synthetically generated peptide
CCEMCCNPACTGCY

SEQ ID NO: 97 - protein, 14 aa, Artificial Sequence
  Synthetically generated peptide
CCEFCCNPACTGCY

SEQ ID NO: 98 - protein, 14 aa, Artificial Sequence
  Synthetically generated peptide
CCEPCCNPACTGCY

SEQ ID NO: 99 - protein, 14 aa, Artificial Sequence
  Synthetically generated peptide
CCESCCNPACTGCY

SEQ ID NO: 100 - protein, 14 aa, Artificial Sequence
  Synthetically generated peptide
CCETCCNPACTGCY

SEQ ID NO: 101 - protein, 14 aa, Artificial Sequence
  Synthetically generated peptide
CCEWCCNPACTGCY

SEQ ID NO: 102 - protein, 14 aa, Artificial Sequence
  Synthetically generated peptide
CCEVCCNPACTGCY

SEQ ID NO: 103 - protein, 14 aa, Artificial Sequence
  Synthetically generated peptide
CCEYCCNPACTGCY

SEQ ID NO: 104 - protein, 14 aa, Artificial Sequence
  Synthetically generated peptide
CCELCCNPACTGCY

SEQ ID NO: 105 - protein, 14 aa, Artificial Sequence
  Synthetically generated peptide
CCELCCNPACTGCY

SEQ ID NO: 106 - protein, 14 aa, Artificial Sequence
  Synthetically generated peptide
CCEYCCNPACTGCY

SEQ ID NO: 107 - protein, 14 aa, Artificial Sequence
  Synthetically generated peptide
CCEFCCNPACTGCY

SEQ ID NO: 108 - protein, 14 aa, Artificial Sequence
  Synthetically generated peptide
CCEWCCNPACTGCY

SEQ ID NO: 109 - protein, 13 aa, Artificial Sequence
  Synthetically generated peptide
CCELCCNPACTGC

SEQ ID NO: 110 - protein, 13 aa, Artificial Sequence
  Synthetically generated peptide
CCEYCCNPACTGC

SEQ ID NO: 111 - protein, 13 aa, Artificial Sequence
  Synthetically generated peptide
CCEFCCNPACTGC

SEQ ID NO: 112 - protein, 13 aa, Artificial Sequence
  Synthetically generated peptide
CCEWCCNPACTGC

SEQ ID NO: 113 - protein, 19 aa, Artificial Sequence
  Synthetically generated peptide
QSSNYCCEYCCNPACTGCY

SEQ ID NO: 114 - protein, 19 aa, Artificial Sequence
  Synthetically generated peptide
NTSNYCCEYCCNPACTGCY

SEQ ID NO: 115 - protein, 19 aa, Artificial Sequence
  Synthetically generated peptide
NLSNYCCEYCCNPACTGCY

SEQ ID NO: 116 - protein, 19 aa, Artificial Sequence
  Synthetically generated peptide
NISNYCCEYCCNPACTGCY

SEQ ID NO: 117 - protein, 19 aa, Artificial Sequence
  Synthetically generated peptide
NSSQYCCEYCCNPACTGCY

SEQ ID NO: 118 - protein, 18 aa, Artificial Sequence
  Synthetically generated peptide
SSNYCCEYCCNPACTGCY

SEQ ID NO: 119 - protein, 19 aa, Artificial Sequence
  Synthetically generated peptide
QSSQYCCEYCCNPACTGCY

SEQ ID NO: 120 - protein, 18 aa, Artificial Sequence
  Synthetically generated peptide
SSQYCCEYCCNPACTGCY

SEQ ID NO: 121 - protein, 19 aa, Artificial Sequence
  Synthetically generated peptide
NSSNYCCEACCNPACTGCY

SEQ ID NO: 122 - protein, 19 aa, Artificial Sequence
  Synthetically generated peptide
NSSNYCCERCCNPACTGCY

SEQ ID NO: 123 - protein, 19 aa, Artificial Sequence
  Synthetically generated peptide
NSSNYCCENCCNPACTGCY

SEQ ID NO: 124 - protein, 19 aa, Artificial Sequence
  Synthetically generated peptide
NSSNYCCEDCCNPACTGCY

SEQ ID NO: 125 - protein, 19 aa, Artificial Sequence
  Synthetically generated peptide
NSSNYCCECCCNPACTGCY

SEQ ID NO: 126 - protein, 19 aa, Artificial Sequence
  Synthetically generated peptide
NSSNYCCEQCCNPACTGCY

SEQ ID NO: 127 - protein, 19 aa, Artificial Sequence
  Synthetically generated peptide
NSSNYCCEECCNPACTGCY

SEQ ID NO: 128 - protein, 19 aa, Artificial Sequence
  Synthetically generated peptide
NSSNYCCEGCCNPACTGCY

SEQ ID NO: 129 - protein, 19 aa, Artificial Sequence
  Synthetically generated peptide
NSSNYCCEHCCNPACTGCY

SEQ ID NO: 130 - protein, 19 aa, Artificial Sequence
  Synthetically generated peptide
NSSNYCCEICCNPACTGCY

SEQ ID NO: 131 - protein, 19 aa, Artificial Sequence
  Synthetically generated peptide
NSSNYCCEKCCNPACTGCY

SEQ ID NO: 132 - protein, 19 aa, Artificial Sequence
  Synthentically generated peptide
NSSNYCCEMCCNPACTGCY

SEQ ID NO: 133 - protein, 19 aa, Artificial Sequence
  Synthetically generated peptide
NSSNYCCEFCCNPACTGCY

SEQ ID NO: 134 - protein, 19 aa, Artificial Sequence
  Synthetically generated peptide
NSSNYCCEPCCNPACTGCY

SEQ ID NO: 135 - protein, 19 aa, Artificial Sequence
  Synthetically generated peptide
NSSNYCCESCCNPACTGCY

SEQ ID NO: 136 - protein, 19 aa, Artificial Sequence
  Synthetically generated peptide
NSSNYCCETCCNPACTGCY

SEQ ID NO: 137 - protein, 19 aa, Artificial Sequence
  Synthetically generated peptide
NSSNYCCEWCCNPACTGCY

SEQ ID NO: 138 - protein, 19 aa, Artificial Sequence
  Synthetically generated peptide
NSSNYCCEVCCNPACTGCY

SEQ ID NO: 139 - protein, 14 aa, Artificial Sequence
  Synthetically generated peptide
CCEACCNPACTGCY

SEQ ID NO: 140 - protein, 14 aa, Artificial Sequence
  Synthetically generated peptide
CCERCCNPACTGCY

SEQ ID NO: 141 - protein, 14 aa, Artificial Sequence
  Synthetically generated peptide
CCENCCNPACTGCY

SEQ ID NO: 142 - protein, 14 aa, Artificial Sequence
  Synthetically generated peptide
CCEDCCNPACTGCY

SEQ ID NO: 143 - protein, 14 aa, Artificial Sequence
  Synthetically generated peptide
CCECCCNPACTGCY

SEQ ID NO: 144 - protein, 14 aa, Artificial Sequence
  Synthetically generated peptide
CCEQCCNPACTGCY

SEQ ID NO: 145 - protein, 14 aa, Artificial Sequence
  Synthetically generated peptide
CCEECCNPACTGCY

SEQ ID NO: 146 - protein, 14 aa, Artificial Sequence
  Synthetically generated peptide
CCEGCCNPACTGCY

SEQ ID NO: 147 - protein, 14 aa, Artificial Sequence
  Synthetically generated peptide
CCEHCCNPACTGCY

SEQ ID NO: 148 - protein, 14 aa, Artificial Sequence
  Synthetically generated peptide
CCEICCNPACTGCY

SEQ ID NO: 149 - protein, 14 aa, Artificial Sequence
  Synthetically generated peptide
CCEKCCNPACTGCY

SEQ ID NO: 150 - protein, 14 aa, Artificial Sequence
  Synthetically generated peptide
CCEMCCNPACTGCY

SEQ ID NO: 151 - protein, 14 aa, Artificial Sequence
  Synthetically generated peptide
CCEFCCNPACTGCY

SEQ ID NO: 152 - protein, 14 aa, Artificial Sequence
  Synthetically generated peptide
CCEPCCNPACTGCY

SEQ ID NO: 153 - protein, 14 aa, Artificial Sequence
  Synthetically generated peptide
CCESCCNPACTGCY

SEQ ID NO: 154 - protein, 14 aa, Artificial Sequence
  Synthetically generated peptide
CCETCCNPACTGCY

SEQ ID NO: 155 - protein, 14 aa, Artificial Sequence
  Synthetically generated peptide
CCEWCCNPACTGCY

SEQ ID NO: 156 - protein, 14 aa, Artificial Sequence
  Synthetically generated peptide
CCEVCCNPACTGCY

SEQ ID NO: 157 - protein, 13 aa, Artificial Sequence
  Synthetically generated peptide
CCEYCCNPACTGC

SEQ ID NO: 158 - protein, 13 aa, Artificial Sequence
  Synthetically generated peptide
CCEACCNPACTGC

SEQ ID NO: 159 - protein, 13 aa, Artificial Sequence
  Synthetically generated peptide
CCERCCNPACTGC

SEQ ID NO: 160 - protein, 13 aa, Artificial Sequence
  Synthetically generated peptide
CCENCCNPACTGC

SEQ ID NO: 161 - protein, 13 aa, Artificial Sequence
  Synthetically generated peptide
CCEDCCNPACTGC

SEQ ID NO: 162 - protein, 13 aa, Artificial Sequence
  Synthetically generated peptide
CCECCCNPACTGC

SEQ ID NO: 163 - protein, 13 aa, Artificial Sequence
  Synthetically generated peptide
CCEQCCNPACTGC

SEQ ID NO: 164 - protein, 13 aa, Artificial Sequence
  Synthetically generated peptide
CCEECCNPACTGC

SEQ ID NO: 165 - protein, 13 aa, Artificial Sequence
  Synthetically generated peptide
CCEGCCNPACTGC

SEQ ID NO: 166 - protein, 13 aa, Artificial Sequence
  Synthetically generated peptide
CCEHCCNPACTGC

SEQ ID NO: 167 - protein, 13 aa, Artificial Sequence
  Synthetically generated peptide
CCEICCNPACTGC

SEQ ID NO: 168 - protein, 13 aa, Artificial Sequence
  Synthetically generated peptide
CCEKCCNPACTGC

SEQ ID NO: 169 - protein, 13 aa, Artificial Sequence
  Synthetically generated peptide
CCEMCCNPACTGC

SEQ ID NO: 170 - protein, 13 aa, Artificial Sequence
  Synthetically generated peptide
CCEFCCNPACTGC

SEQ ID NO: 171 - protein, 13 aa, Artificial Sequence
  Synthetically generated peptide
CCEPCCNPACTGC

SEQ ID NO: 172 - protein, 13 aa, Artificial Sequence
  Synthetically generated peptide
CCESCCNPACTGC

SEQ ID NO: 173 - protein, 13 aa, Artificial Sequence
  Synthetically generated peptide
CCETCCNPACTGC

SEQ ID NO: 174 - protein, 13 aa, Artificial Sequence
  Synthetically generated peptide
CCEWCCNPACTGC

SEQ ID NO: 175 - protein, 13 aa, Artificial Sequence
  Synthetically generated peptide
CCEVCCNPACTGC

SEQ ID NO: 176 - protein, 14 aa, Artificial Sequence
  Synthetically generated peptide
CCELCCAPACTGCY

SEQ ID NO: 177 - protein, 14 aa, Artificial Sequence
  Synthetically generated peptide
CCELCCVPACTGCY

SEQ ID NO: 178 - protein, 14 aa, Artificial Sequence
  Synthetically generated peptide
CCELCCLPACTGCY

SEQ ID NO: 179 - protein, 14 aa, Artificial Sequence
  Synthetically generated peptide
CCELCCIPACTGCY

SEQ ID NO: 180 - protein, 14 aa, Artificial Sequence
  Synthetically generated peptide
CCELCCPPACTGCY

SEQ ID NO: 181 - protein, 14 aa, Artificial Sequence
  Synthetically generated peptide
CCELCCMPACTGCY

SEQ ID NO: 182 - protein, 14 aa, Artificial Sequence
  Synthetically generated peptide
CCELCCFPACTGCY

SEQ ID NO: 183 - protein, 14 aa, Artificial Sequence
  Synthetically generated peptide
CCELCCWPACTGCY

SEQ ID NO: 184 - protein, 14 aa, Artificial Sequence
  Synthetically generated peptide
CCELCCGPACTGCY

SEQ ID NO: 185 - protein, 14 aa, Artificial Sequence
  Synthetically generated peptide
CCELCCSPACTGCY

SEQ ID NO: 186 - protein, 14 aa, Artificial Sequence
  Synthetically generated peptide
CCELCCTPACTGCY

SEQ ID NO: 187 - protein, 14 aa, Artificial Sequence
  Synthetically generated peptide
CCELCCCPACTGCY

SEQ ID NO: 188 - protein, 14 aa, Artificial Sequence
  Synthetically generated peptide
CCELCCQPACTGCY

SEQ ID NO: 189 - protein, 14 aa, Artificial Sequence
  Synthetically generated peptide
CCELCCYPACTGCY

SEQ ID NO: 190 - protein, 14 aa, Artificial Sequence
  Synthetically generated peptide
CCELCCDPACTGCY

SEQ ID NO: 191 - protein, 21 aa, Artificial Sequence
  Synthetically generated peptide
  VARIANT (1)..(2): Xaa = any amino acid
  misc_feature (3)..(5): Xaa can be any naturally occurring amino acid
  VARIANT (8)..(9): Xaa = any amino acid
  misc_feature (12)..(14): Xaa can be any naturally occurring amino acid
  misc_feature (16)..(17): Xaa can be any naturally occurring amino acid
  misc_feature (19)..(21): Xaa can be any naturally occurring amino acid
XXXXXCCXXCCXXXCXXCXXX

SEQ ID NO: 192 - protein, 21 aa, Artificial Sequence
  Synthetically generated peptide
  VARIANT (9)..(9): Xaa = Leu, Ile, Val, Trp, Tyr or Phe
  VARIANT (19)..(19): Xaa=Trp, Tyr, Phe or Leu
  VARIANT (20)..(21): Xaa 20 = Asp, Xaa21 = Phe
NSSNYCCEXCCNPACTGCXXX

SEQ ID NO: 193 - protein, 14 aa, Artificial Sequence
  Synthetically generated peptide
CCEYCCNPACTGCY

SEQ ID NO: 194 - protein, 19 aa, Artificial Sequence
  Synthetically generated peptide
NSSNYCCELCCNPACTGCY

SEQ ID NO: 195 - protein, 19 aa, Artificial Sequence
  Synthetically generated peptide
NSSNYCCEYCCNPACTGCY

SEQ ID NO: 196 - protein, 13 aa, Artificial Sequence
  Synthetically generated peptide
CCEYCCNPACTGC

SEQ ID NO: 197 - protein, 18 aa, Escherichia coli
NTFYCCELCCNPACAGCY

SEQ ID NO: 198 - protein, 14 aa, Artificial Sequence
  Synthetically generated peptide
CCELCCNPACTGCY

SEQ ID NO: 199 - protein, 27 aa, Artificial Sequence
  Synthetically generated peptide
  misc_feature (1)..(5): Xaa can be any naturally occurring amino acid
  misc_feature (8)..(10): Xaa can be any naturally occurring amino acid
  misc_feature (12)..(12): Xaa can be any naturally occurring amino acid
  misc_feature (14)..(14): Xaa can be any naturally occurring amino acid
  misc_feature (19)..(19): Xaa can be any naturally occurring amino acid
XXXXXLRXXXZXDXCELCXNVACTGCL

SEQ ID NO: 200 - protein, 14 aa, Artificial Sequence
  Synthetically generated peptide
CCELCCEPACTGCY

SEQ ID NO: 201 - protein, 14 aa, Artificial Sequence
  Synthetically generated peptide
CCELCCKPACTGCY

SEQ ID NO: 202 - protein, 14 aa, Artificial Sequence
  Synthetically generated peptide
CCELCCRPACTGCY

SEQ ID NO: 203 - protein, 14 aa, Artificial Sequence
  Synthetically generated peptide
CCELCCHPACTGCY

SEQ ID NO: 204 - protein, 14 aa, Artificial Sequence
  Synthetically generated peptide
CCEYCCAPACTGCY

SEQ ID NO: 205 - protein, 14 aa, Artificial Sequence
  Synthetically generated peptide
CCEYCCVPACTGCY

SEQ ID NO: 206 - protein, 14 aa, Artificial Sequence
  Synthetically generated peptide
CCEYCCLPACTGCY

SEQ ID NO: 207 - protein, 14 aa, Artificial Sequence
  Synthetically generated peptide
CCEYCCIPACTGCY

SEQ ID NO: 208 - protein, 14 aa, Artificial Sequence
  Synthetically generated peptide
CCEYCCPPACTGCY

SEQ ID NO: 209 - protein, 14 aa, Artificial Sequence
  Synthetically generated peptide
CCEYCCMPACTGCY

SEQ ID NO: 210 - protein, 13 aa, Artificial Sequence
  Synthetically generated peptide
CCEMCCNPACAGC

SEQ ID NO: 211 - protein, 13 aa, Artificial Sequence
  Synthetically generated peptide
CCENCCNPACAGC

SEQ ID NO: 212 - protein, 13 aa, Artificial Sequence
  Synthetically generated peptide
CCEPCCNPACAGC

SEQ ID NO: 213 - protein, 13 aa, Artificial Sequence
  Synthetically generated peptide
CCEQCCNPACAGC

SEQ ID NO: 214 - protein, 13 aa, Artificial Sequence
  Synthetically generated peptide
CCERCCNPACAGC

SEQ ID NO: 215 - protein, 13 aa, Artificial Sequence
  Synthetically generated peptide
CCESCCNPACAGC

SEQ ID NO: 216 - protein, 13 aa, Artificial Sequence
  Synthetically generated peptide
CCETCCNPACAGC

SEQ ID NO: 217 - protein, 13 aa, Artificial Sequence
  Synthetically generated peptide
CCEWCCNPACAGC

SEQ ID NO: 218 - protein, 13 aa, Artificial Sequence
  Synthetically generated peptide
CCEYCCNPACAGC

SEQ ID NO: 219 - protein, 14 aa, Artificial Sequence
  Synthetically generated peptide
CCELCCNPACTGCY

SEQ ID NO: 220 - protein, 18 aa, Artificial Sequence
  Synthetically generated peptide
  VARIANT (3)..(10): Xaa = Any Amino Acid
  misc_feature (16)..(17): Xaa can be any naturally occurring amino acid
CCXEYCCNPXACTGCXXY

SEQ ID NO: 221 - protein, 16 aa, Artificial Sequence
  Synthetically generated peptide
  VARIANT (3)..(11): Xaa = Any Amino Acid
CCXEYCCNPAXCTGCY

SEQ ID NO: 222 - protein, 17 aa, Artificial Sequence
  Synthetically generated peptide
  VARIANT (3)..(11): Xaa = Any Amino Acid
  misc_feature (12)..(12): Xaa can be any naturally occurring amino acid
CCXEYCCNPAXXCTGCY

SEQ ID NO: 223 - protein, 18 aa, Artificial Sequence
  Synthetically generated peptide
  VARIANT (3)..(11): Xaa = Any Amino Acid
  misc_feature (12)..(13): Xaa can be any naturally occurring amino acid
CCXEYCCNPAXXXCTGCY

SEQ ID NO: 224 - protein, 18 aa, Artificial Sequence
  Synthetically generated peptide
  VARIANT (3)..(11): Xaa = Any Amino Acid
  misc_feature (12)..(12): Xaa can be any naturally occurring amino acid
  misc_feature (14)..(14): Xaa can be any naturally occurring amino acid
CCXEYCCNPAXXCXTGCY

SEQ ID NO: 225 - protein, 18 aa, Artificial Sequence
  Synthetically generated peptide
  VARIANT (3)..(11): Xaa = Any Amino Acid
  misc_feature (12)..(12): Xaa can be any naturally occurring amino acid
  misc_feature (15)..(15): Xaa can be any naturally occurring amino acid
CCXEYCCNPAXXCTXGCY

SEQ ID NO: 226 - protein, 18 aa, Artificial Sequence
  Synthetically generated peptide
  VARIANT (3)..(11): Xaa = Any Amino Acid
  misc_feature (12)..(12): Xaa can be any naturally occurring amino acid
  misc_feature (16)..(16): Xaa can be any naturally occurring amino acid
CCXEYCCNPAXXCTGXCY

SEQ ID NO: 227 - protein, 18 aa, Artificial Sequence
  Synthetically generated peptide
  VARIANT (3)..(11): Xaa = Any Amino Acid
  misc_feature (12)..(12): Xaa can be any naturally occurring amino acid
  misc_feature (17)..(17): Xaa can be any naturally occurring amino acid
CCXEYCCNPAXXCTGCXY

SEQ ID NO: 228 - protein, 17 aa, Artificial Sequence
  Synthetically generated peptide
  VARIANT (3)..(11): Xaa = Any Amino Acid
  misc_feature (13)..(13): Xaa can be any naturally occurring amino acid
CCXEYCCNPAXCXTGCY

SEQ ID NO: 229 - protein, 18 aa, Artificial Sequence
  Synthetically generated peptide
  VARIANT (3)..(11): Xaa = Any Amino Acid
  misc_feature (13)..(14): Xaa can be any naturally occurring amino acid
CCXEYCCNPAXCXXTGCY

SEQ ID NO: 230 - protein, 18 aa, Artificial Sequence
  Synthetically generated peptide
  VARIANT (3)..(11): Xaa = Any Amino Acid
  misc_feature (13)..(13): Xaa can be any naturally occurring amino acid
  misc_feature (15)..(15): Xaa can be any naturally occurring amino acid
CCXEYCCNPAXCXTXGCY

SEQ ID NO: 231 - protein, 18 aa, Artificial Sequence
  Synthetically generated peptide
  VARIANT (3)..(11): Xaa = Any Amino Acid
  misc_feature (13)..(13): Xaa can be any naturally occurring amino acid
  misc_feature (16)..(16): Xaa can be any naturally occurring amino acid
CCXEYCCNPAXCXTGXCY

SEQ ID NO: 232 - protein, 18 aa, Artificial Sequence
  Synthetically generated peptide
  VARIANT (3)..(11): Xaa = Any Amino Acid
  misc_feature (13)..(13): Xaa can be any naturally occurring amino acid
  misc_feature (17)..(17): Xaa can be any naturally occurring amino acid
CCXEYCCNPAXCXTGCXY

SEQ ID NO: 233 - protein, 17 aa, Artificial Sequence
  Synthetically generated peptide
  VARIANT (3)..(11): Xaa = Any Amino Acid
  misc_feature (14)..(14): Xaa can be any naturally occurring amino acid
CCXEYCCNPAXCTXGCY

SEQ ID NO: 234 - protein, 18 aa, Artificial Sequence
  Synthetically generated peptide
  VARIANT (3)..(11): Xaa = Any Amino Acid
  misc_feature (14)..(15): Xaa can be any naturally occurring amino acid
CCXEYCCNPAXCTXXGCY

SEQ ID NO: 235 - protein, 18 aa, Artificial Sequence
  Synthetically generated peptide
  VARIANT (3)..(11): Xaa = Any Amino Acid
  misc_feature (14)..(14): Xaa can be any naturally occurring amino acid
  misc_feature (16)..(16): Xaa can be any naturally occurring amino acid
CCXEYCCNPAXCTXGXCY

SEQ ID NO: 236 - protein, 18 aa, Artificial Sequence
  Synthetically generated peptide
  VARIANT (3)..(11): Xaa = Any Amino Acid
  misc_feature (14)..(14): Xaa can be any naturally occurring amino acid
  misc_feature (17)..(17): Xaa can be any naturally occurring amino acid
CCXEYCCNPAXCTXGCXY

SEQ ID NO: 237 - protein, 17 aa, Artificial Sequence
  Synthetically generated peptide
  VARIANT (3)..(11): Xaa = Any Amino Acid
  misc_feature (15)..(15): Xaa can be any naturally occurring amino acid
CCXEYCCNPAXCTGXCY

SEQ ID NO: 238 - protein, 18 aa, Artificial Sequence
  Synthetically generated peptide
  VARIANT (3)..(11): Xaa = Any Amino Acid
  misc_feature (15)..(16): Xaa can be any naturally occurring amino acid
CCXEYCCNPAXCTGXXCY

SEQ ID NO: 239 - protein, 18 aa, Artificial Sequence
  Synthetically generated peptide
  VARIANT (3)..(11): Xaa = Any Amino Acid
  misc_feature (15)..(15): Xaa can be any naturally occurring amino acid
  misc_feature (17)..(17): Xaa can be any naturally occurring amino acid
CCXEYCCNPAXCTGXCXY

SEQ ID NO: 240 - protein, 17 aa, Artificial Sequence
  Synthetically generated peptide
  VARIANT (3)..(11): Xaa = Any Amino Acid
  misc_feature (16)..(16): Xaa can be any naturally occurring amino acid
CCXEYCCNPAXCTGCXY

SEQ ID NO: 241 - protein, 18 aa, Artificial Sequence
  Synthetically generated peptide
  VARIANT (3)..(11): Xaa = Any Amino Acid
  misc_feature (16)..(17): Xaa can be any naturally occurring amino acid
CCXEYCCNPAXCTGCXXY

SEQ ID NO: 242 - protein, 16 aa, Artificial Sequence
  Synthetically generated peptide
  VARIANT (3)..(12): Xaa = Any Amino Acid
CCXEYCCNPACXTGCY

SEQ ID NO: 243 - protein, 17 aa, Artificial Sequence
  Synthetically generated peptide
  VARIANT (3)..(12): Xaa = Any Amino Acid
  misc_feature (13)..(13): Xaa can be any naturally occurring amino acid
CCXEYCCNPACXXTGCY

SEQ ID NO: 244 - protein, 18 aa, Artificial Sequence
  Synthetically generated peptide
  VARIANT (3)..(12): Xaa = Any Amino Acid
  misc_feature (13)..(14): Xaa can be any naturally occurring amino acid
CCXEYCCNPACXXXTGCY

SEQ ID NO: 245 - protein, 18 aa, Artificial Sequence
  Synthetically generated peptide
  VARIANT (3)..(12): Xaa = Any Amino Acid
  misc_feature (13)..(13): Xaa can be any naturally occurring amino acid
  misc_feature (15)..(15): Xaa can be any naturally occurring amino acid
CCXEYCCNPACXXTXGCY

SEQ ID NO: 246 - protein, 18 aa, Artificial Sequence
  Synthetically generated peptide
  VARIANT (3)..(12): Xaa = Any Amino Acid
  misc_feature (13)..(13): Xaa can be any naturally occurring amino acid
  misc_feature (16)..(16): Xaa can be any naturally occurring amino acid
CCXEYCCNPACXXTGXCY

SEQ ID NO: 247 - protein, 18 aa, Artificial Sequence
  Synthetically generated peptide
  VARIANT (3)..(12): Xaa = Any Amino Acid
  misc_feature (13)..(13): Xaa can be any naturally occurring amino acid
  misc_feature (17)..(17): Xaa can be any naturally occurring amino acid
CCXEYCCNPACXXTGCXY

SEQ ID NO: 248 - protein, 17 aa, Artificial Sequence
  Synthetically generated peptide
  VARIANT (3)..(12): Xaa = Any Amino Acid
  misc_feature (14)..(14): Xaa can be any naturally occurring amino acid
CCXEYCCNPACXTXGCY

SEQ ID NO: 249 - protein, 18 aa, Artificial Sequence
  Synthetically generated peptide
  VARIANT (3)..(12): Xaa = Any Amino Acid
  misc_feature (14)..(15): Xaa can be any naturally occurring amino acid
CCXEYCCNPACXTXXGCY

SEQ ID NO: 250 - protein, 18 aa, Artificial Sequence
  Synthetically generated peptide
  VARIANT (3)..(12): Xaa = Any Amino Acid
  misc_feature (14)..(14): Xaa can be any naturally occurring amino acid
  misc_feature (16)..(16): Xaa can be any naturally occurring amino acid
CCXEYCCNPACXTXGXCY

SEQ ID NO: 251 - protein, 18 aa, Artificial Sequence
  Synthetically generated peptide
  VARIANT (3)..(12): Xaa = Any Amino Acid
  misc_feature (14)..(14): Xaa can be any naturally occurring amino acid
  misc_feature (17)..(17): Xaa can be any naturally occurring amino acid
CCXEYCCNPACXTXGCXY

SEQ ID NO: 252 - protein, 17 aa, Artificial Sequence
  Synthetically generated peptide
  VARIANT (3)..(12): Xaa = Any Amino Acid
  misc_feature (15)..(15): Xaa can be any naturally occurring amino acid
CCXEYCCNPACXTGXCY

SEQ ID NO: 253 - protein, 18 aa, Artificial Sequence
  Synthetically generated peptide
  VARIANT (3)..(12): Xaa = Any Amino Acid
  misc_feature (15)..(16): Xaa can be any naturally occurring amino acid
CCXEYCCNPACXTGXXCY

SEQ ID NO: 254 - protein, 18 aa, Artificial Sequence
  Synthetically generated peptide
  VARIANT (3)..(12): Xaa = Any Amino Acid
  misc_feature (15)..(15): Xaa can be any naturally occurring amino acid
  misc_feature (17)..(17): Xaa can be any naturally occurring amino acid
CCXEYCCNPACXTGXCXY

SEQ ID NO: 255 - protein, 17 aa, Artificial Sequence
  Synthetically generated peptide
  VARIANT (3)..(12): Xaa = Any Amino Acid
  misc_feature (16)..(16): Xaa can be any naturally occurring amino acid
CCXEYCCNPACXTGCXY

SEQ ID NO: 256 - protein, 18 aa, Artificial Sequence
  Synthetically generated peptide
  VARIANT (3)..(12): Xaa = Any Amino Acid
  misc_feature (16)..(17): Xaa can be any naturally occurring amino acid
CCXEYCCNPACXTGCXXY

SEQ ID NO: 257 - protein, 16 aa, Artificial Sequence
  Synthetically generated peptide
  VARIANT (3)..(13): Xaa = Any Amino Acid
CCXEYCCNPACTXGCY

SEQ ID NO: 258 - protein, 17 aa, Artificial Sequence
  Synthetically generated peptide
  VARIANT (3)..(13): Xaa = Any Amino Acid
  misc_feature (14)..(14): Xaa can be any naturally occurring amino acid
CCXEYCCNPACTXXGCY

SEQ ID NO: 259 - protein, 18 aa, Artificial Sequence
  Synthetically generated peptide
  VARIANT (3)..(13): Xaa = Any Amino Acid
  misc_feature (14)..(15): Xaa can be any naturally occurring amino acid
CCXEYCCNPACTXXXGCY

SEQ ID NO: 260 - protein, 18 aa, Artificial Sequence
  Synthetically generated peptide
  VARIANT (3)..(13): Xaa = Any Amino Acid
  misc_feature (14)..(14): Xaa can be any naturally occurring amino acid
  misc_feature (16)..(16): Xaa can be any naturally occurring amino acid
CCXEYCCNPACTXXGXCY

SEQ ID NO: 261 - protein, 18 aa, Artificial Sequence
  Synthetically generated peptide
  VARIANT (3)..(13): Xaa = Any Amino Acid
  misc_feature (14)..(14): Xaa can be any naturally occurring amino acid
  misc_feature (17)..(17): Xaa can be any naturally occurring amino acid
CCXEYCCNPACTXXGCXY

SEQ ID NO: 262 - protein, 17 aa, Artificial Sequence
  Synthetically generated peptide
  VARIANT (3)..(13): Xaa = Any Amino Acid
  misc_feature (15)..(15): Xaa can be any naturally occurring amino acid
CCXEYCCNPACTXGXCY

SEQ ID NO: 263 - protein, 18 aa, Artificial Sequence
  Synthetically generated peptide
  VARIANT (3)..(13): Xaa = Any Amino Acid
  misc_feature (15)..(16): Xaa can be any naturally occurring amino acid
CCXEYCCNPACTXGXXCY

SEQ ID NO: 264 - protein, 18 aa, Artificial Sequence
  Synthetically generated peptide
  VARIANT (3)..(13): Xaa = Any Amino Acid
  misc_feature (15)..(15): Xaa can be any naturally occurring amino acid
  misc_feature (17)..(17): Xaa can be any naturally occurring amino acid
CCXEYCCNPACTXGXCXY

SEQ ID NO: 265 - protein, 17 aa, Artificial Sequence
  Synthetically generated peptide
  VARIANT (3)..(13): Xaa = Any Amino Acid
  misc_feature (16)..(16): Xaa can be any naturally occurring amino acid
CCXEYCCNPACTXGCXY

SEQ ID NO: 266 - protein, 18 aa, Artificial Sequence
  Synthetically generated peptide
  VARIANT (3)..(13): Xaa = Any Amino Acid
  misc_feature (16)..(17): Xaa can be any naturally occurring amino acid
CCXEYCCNPACTXGCXXY

SEQ ID NO: 267 - protein, 16 aa, Artificial Sequence
  Synthetically generated peptide
  VARIANT (3)..(14): Xaa = Any Amino Acid
CCXEYCCNPACTGXCY

SEQ ID NO: 268 - protein, 17 aa, Artificial Sequence
  Synthetically generated peptide
  VARIANT (3)..(14): Xaa = Any Amino Acid
  misc_feature (15)..(15): Xaa can be any naturally occurring amino acid
CCXEYCCNPACTGXXCY

SEQ ID NO: 269 - protein, 18 aa, Artificial Sequence
  Synthetically generated peptide
  VARIANT (3)..(14): Xaa = Any Amino Acid
  misc_feature (15)..(16): Xaa can be any naturally occurring amino acid
CCXEYCCNPACTGXXXCY

SEQ ID NO: 270 - protein, 18 aa, Artificial Sequence
  Synthetically generated peptide
  VARIANT (3)..(14): Xaa = Any Amino Acid
  misc_feature (15)..(15): Xaa can be any naturally occurring amino acid
  misc_feature (17)..(17): Xaa can be any naturally occurring amino acid
CCXEYCCNPACTGXXCXY

SEQ ID NO: 271 - protein, 17 aa, Artificial Sequence
  Synthetically generated peptide
  VARIANT (3)..(14): Xaa = Any Amino Acid
  misc_feature (16)..(16): Xaa can be any naturally occurring amino acid
CCXEYCCNPACTGXCXY

SEQ ID NO: 272 - protein, 18 aa, Artificial Sequence
  Synthetically generated peptide
  VARIANT (3)..(14): Xaa = Any Amino Acid
  misc_feature (16)..(17): Xaa can be any naturally occurring amino acid
CCXEYCCNPACTGXCXXY

SEQ ID NO: 273 - protein, 16 aa, Artificial Sequence
  Synthetically generated peptide
  VARIANT (3)..(15): Xaa = Any Amino Acid
CCXEYCCNPACTGCXY

SEQ ID NO: 274 - protein, 17 aa, Artificial Sequence
  Synthetically generated peptide
  VARIANT (3)..(15): Xaa = Any Amino Acid
  misc_feature (16)..(16): Xaa can be any naturally occurring amino acid
CCXEYCCNPACTGCXXY

SEQ ID NO: 275 - protein, 18 aa, Artificial Sequence
  Synthetically generated peptide
  VARIANT (3)..(15): Xaa = Any Amino Acid
  misc_feature (16)..(17): Xaa can be any naturally occurring amino acid
CCXEYCCNPACTGCXXXY

SEQ ID NO: 276 - protein, 15 aa, Artificial Sequence
  Synthetically generated peptide
  VARIANT (4)..(4): Xaa = Any Amino Acid
CCEXYCCNPACTGCY

SEQ ID NO: 277 - protein, 16 aa, Artificial Sequence
  Synthetically generated peptide
  VARIANT (4)..(5): Xaa = Any Amino Acid
CCEXXYCCNPACTGCY

SEQ ID NO: 278 - protein, 17 aa, Artificial Sequence
  Synthetically generated peptide
  VARIANT (4)..(5): Xaa = Any Amino Acid
  misc_feature (6)..(6): Xaa can be any naturally occurring amino acid
CCEXXXYCCNPACTGCY

SEQ ID NO: 279 - protein, 18 aa, Artificial Sequence
  Synthetically generated peptide
  VARIANT (4)..(5): Xaa = Any Amino Acid
  misc_feature (6)..(7): Xaa can be any naturally occurring amino acid
CCEXXXXYCCNPACTGCY

SEQ ID NO: 280 - protein, 18 aa, Artificial Sequence
  Synthetically generated peptide
  VARIANT (4)..(5): Xaa = Any Amino Acid
  misc_feature (6)..(6): Xaa can be any naturally occurring amino acid
  misc_feature (8)..(8): Xaa can be any naturally occurring amino acid
CCEXXXYXCCNPACTGCY

SEQ ID NO: 281 - protein, 18 aa, Artificial Sequence
  Synthetically generated peptide
  VARIANT (4)..(5): Xaa = Any Amino Acid
  misc_feature (6)..(6): Xaa can be any naturally occurring amino acid
  misc_feature (10)..(10): Xaa can be any naturally occurring amino acid
CCEXXXYCCXNPACTGCY

SEQ ID NO: 282 - protein, 18 aa, Artificial Sequence
  Synthetically generated peptide
  VARIANT (4)..(5): Xaa = Any Amino Acid
  misc_feature (6)..(6): Xaa can be any naturally occurring amino acid
  misc_feature (11)..(11): Xaa can be any naturally occurring amino acid
CCEXXXYCCNXPACTGCY

SEQ ID NO: 283 - protein, 18 aa, Artificial Sequence
  Synthetically generated peptide
  VARIANT (4)..(5): Xaa = Any Amino Acid
  misc_feature (6)..(6): Xaa can be any naturally occurring amino acid
  misc_feature (12)..(12): Xaa can be any naturally occurring amino acid
CCEXXXYCCNPXACTGCY

SEQ ID NO: 284 - protein, 18 aa, Artificial Sequence
  Synthetically generated peptide
  VARIANT (4)..(5): Xaa = Any Amino Acid
  misc_feature (6)..(6): Xaa can be any naturally occurring amino acid
  misc_feature (13)..(13): Xaa can be any naturally occurring amino acid
CCEXXXYCCNPAXCTGCY

SEQ ID NO: 285 - protein, 18 aa, Artificial Sequence
  Synthetically generated peptide
  VARIANT (4)..(5): Xaa = Any Amino Acid
  misc_feature (6)..(6): Xaa can be any naturally occurring amino acid
  misc_feature (14)..(14): Xaa can be any naturally occurring amino acid
CCEXXXYCCNPACXTGCY

SEQ ID NO: 286 - protein, 18 aa, Artificial Sequence
  Synthetically generated peptide
  VARIANT (4)..(5): Xaa = Any Amino Acid
  misc_feature (6)..(6): Xaa can be any naturally occurring amino acid
  misc_feature (15)..(15): Xaa can be any naturally occurring amino acid
CCEXXXYCCNPACTXGCY

SEQ ID NO: 287 - protein, 18 aa, Artificial Sequence
  Synthetically generated peptide
  VARIANT (4)..(5): Xaa = Any Amino Acid
  misc_feature (6)..(6): Xaa can be any naturally occurring amino acid
  misc_feature (16)..(16): Xaa can be any naturally occurring amino acid
CCEXXXYCCNPACTGXCY

SEQ ID NO: 288 - protein, 18 aa, Artificial Sequence
  Synthetically generated peptide
  VARIANT (4)..(5): Xaa = Any Amino Acid
  misc_feature (6)..(6): Xaa can be any naturally occurring amino acid
  misc_feature (17)..(17): Xaa can be any naturally occurring amino acid
CCEXXXYCCNPACTGCXY

SEQ ID NO: 289 - protein, 17 aa, Artificial Sequence
  Synthetically generated peptide
  VARIANT (4)..(5): Xaa = Any Amino Acid
  misc_feature (7)..(7): Xaa can be any naturally occurring amino acid
CCEXXYXCCNPACTGCY

SEQ ID NO: 290 - protein, 18 aa, Artificial Sequence
  Synthetically generated peptide
  VARIANT (4)..(5): Xaa = Any Amino Acid
  misc_feature (7)..(8): Xaa can be any naturally occurring amino acid
CCEXXYXXCCNPACTGCY

SEQ ID NO: 291 - protein, 18 aa, Artificial Sequence
  Synthetically generated peptide
  VARIANT (4)..(5): Xaa = Any Amino Acid
  misc_feature (7)..(7): Xaa can be any naturally occurring amino acid
  misc_feature (10)..(10): Xaa can be any naturally occurring amino acid
CCEXXYXCCXNPACTGCY

SEQ ID NO: 292 - protein, 18 aa, Artificial Sequence
  Synthetically generated peptide
  VARIANT (4)..(5): Xaa = Any Amino Acid
  misc_feature (7)..(7): Xaa can be any naturally occurring amino acid
  misc_feature (11)..(11): Xaa can be any naturally occurring amino acid
CCEXXYXCCNXPACTGCY

SEQ ID NO: 293 - protein, 18 aa, Artificial Sequence
  Synthetically generated peptide
  VARIANT (4)..(5): Xaa = Any Amino Acid
  misc_feature (7)..(7): Xaa can be any naturally occurring amino acid
  misc_feature (12)..(12): Xaa can be any naturally occurring amino acid
CCEXXYXCCNPXACTGCY

SEQ ID NO: 294 - protein, 18 aa, Artificial Sequence
  Synthetically generated peptide
  VARIANT (4)..(5): Xaa = Any Amino Acid
  misc_feature (7)..(7): Xaa can be any naturally occurring amino acid
  misc_feature (13)..(13): Xaa can be any naturally occurring amino acid
CCEXXYXCCNPAXCTGCY

SEQ ID NO: 295 - protein, 18 aa, Artificial Sequence
  Synthetically generated peptide
  VARIANT (4)..(5): Xaa = Any Amino Acid
  misc_feature (7)..(7): Xaa can be any naturally occurring amino acid
  misc_feature (14)..(14): Xaa can be any naturally occurring amino acid
CCEXXYXCCNPACXTGCY

SEQ ID NO: 296 - protein, 18 aa, Artificial Sequence
  Synthetically generated peptide
  VARIANT (4)..(5): Xaa = Any Amino Acid
  misc_feature (7)..(7): Xaa can be any naturally occurring amino acid
  misc_feature (15)..(15): Xaa can be any naturally occurring amino acid
CCEXXYXCCNPACTXGCY

SEQ ID NO: 297 - protein, 18 aa, Artificial Sequence
  Synthetically generated peptide
  VARIANT (4)..(5): Xaa = Any Amino Acid
  misc_feature (7)..(7): Xaa can be any naturally occurring amino acid
  misc_feature (16)..(16): Xaa can be any naturally occurring amino acid
CCEXXYXCCNPACTGXCY

SEQ ID NO: 298 - protein, 18 aa, Artificial Sequence
  Synthetically generated peptide
  VARIANT (4)..(5): Xaa = Any Amino Acid
  misc_feature (7)..(7): Xaa can be any naturally occurring amino acid
  misc_feature (17)..(17): Xaa can be any naturally occurring amino acid
CCEXXYXCCNPACTGCXY

SEQ ID NO: 299 - protein, 17 aa, Artificial Sequence
  Synthetically generated peptide
  VARIANT (4)..(5): Xaa = Any Amino Acid
  misc_feature (9)..(9): Xaa can be any naturally occurring amino acid
CCEXXYCCXNPACTGCY

SEQ ID NO: 300 - protein, 14 aa, Artificial Sequence
  Synthetically generated peptide
CCEYCCFPACTGCY

SEQ ID NO: 301 - protein, 14 aa, Artificial Sequence
  Synthetically generated peptide
CCEYCCWPACTGCY

SEQ ID NO: 302 - protein, 14 aa, Artificial Sequence
  Synthetically generated peptide
CCEYCCGPACTGCY

SEQ ID NO: 303 - protein, 14 aa, Artificial Sequence
  Synthetically generated peptide
CCEYCCSPACTGCY

SEQ ID NO: 304 - protein, 14 aa, Artificial Sequence
  Synthetically generated peptide
CCEYCCTPACTGCY

SEQ ID NO: 305 - protein, 14 aa, Artificial Sequence
  Synthetically generated peptide
CCEYCCCPACTGCY

SEQ ID NO: 306 - protein, 14 aa, Artificial Sequence
  Synthetically generated peptide
CCEYCCQPACTGCY

SEQ ID NO: 307 - protein, 14 aa, Artificial Sequence
  Synthetically generated peptide
CCEYCCYPACTGCY

SEQ ID NO: 308 - protein, 14 aa, Artificial Sequence
  Synthetically generated peptide
CCEYCCDPACTGCY

SEQ ID NO: 309 - protein, 14 aa, Artificial Sequence
  Synthetically generated peptide
CCEYCCEPACTGCY

SEQ ID NO: 310 - protein, 14 aa, Artificial Sequence
  Synthetically generated peptide
CCEYCCKPACTGCY

SEQ ID NO: 311 - protein, 14 aa, Artificial Sequence
  Synthetically generated peptide
CCEYCCRPACTGCY

SEQ ID NO: 312 - protein, 14 aa, Artificial Sequence
  Synthetically generated peptide
CCEYCCHPACTGCY

SEQ ID NO: 313 - protein, 13 aa, Artificial Sequence
  Synthetically generated peptide
CCELCCAPACTGC

SEQ ID NO: 314 - protein, 13 aa, Artificial Sequence
  Synthetically generated peptide
CCELCCVPACTGC

SEQ ID NO: 315 - protein, 13 aa, Artificial Sequence
  Synthetically generated peptide
CCELCCLPACTGC

SEQ ID NO: 316 - protein, 13 aa, Artificial Sequence
  Synthetically generated peptide
CCELCCIPACTGC

SEQ ID NO: 317 - protein, 13 aa, Artificial Sequence
  Synthetically generated peptide
CCELCCPPACTGC

SEQ ID NO: 318 - protein, 13 aa, Artificial Sequence
  Synthetically generated peptide
CCELCCMPACTGC

SEQ ID NO: 319 - protein, 13 aa, Artificial Sequence
  Synthetically generated peptide
CCELCCFPACTGC

SEQ ID NO: 320 - protein, 13 aa, Artificial Sequence
  Synthetically generated peptide
CCELCCWPACTGC

SEQ ID NO: 321 - protein, 13 aa, Artificial Sequence
  Synthetically generated peptide
CCELCCGPACTGC

SEQ ID NO: 322 - protein, 13 aa, Artificial Sequence
  Synthetically generated peptide
CCELCCSPACTGC

SEQ ID NO: 323 - protein, 13 aa, Artificial Sequence
  Synthetically generated peptide
CCELCCTPACTGC

SEQ ID NO: 324 - protein, 13 aa, Artificial Sequence
  Synthetically generated peptide
CCELCCCPACTGC

SEQ ID NO: 325 - protein, 13 aa, Artificial Sequence
  Synthetically generated peptide
CCELCCQPACTGC

SEQ ID NO: 326 - protein, 13 aa, Artificial Sequence
  Synthetically generated peptide
CCELCCYPACTGC

SEQ ID NO: 327 - protein, 13 aa, Artificial Sequence
  Synthetically generated peptide
CCELCCDPACTGC

SEQ ID NO: 328 - protein, 13 aa, Artificial Sequence
  Synthetically generated peptide
CCELCCEPACTGC

SEQ ID NO: 329 - protein, 13 aa, Artificial Sequence
  Synthetically generated peptide
CCELCCKPACTGC

SEQ ID NO: 330 - protein, 13 aa, Artificial Sequence
  Synthetically generated peptide
CCELCCRPACTGC

SEQ ID NO: 331 - protein, 13 aa, Artificial Sequence
  Synthetically generated peptide
CCELCCHPACTGC

SEQ ID NO: 332 - protein, 13 aa, Artificial Sequence
  Synthetically generated peptide
CCEYCCAPACTGC

SEQ ID NO: 333 - protein, 13 aa, Artificial Sequence
  Synthetically generated peptide
CCEYCCVPACTGC

SEQ ID NO: 334 - protein, 13 aa, Artificial Sequence
  Synthetically generated peptide
CCEYCCLPACTGC

SEQ ID NO: 335 - protein, 13 aa, Artificial Sequence
  Synthetically generated peptide
CCEYCCIPACTGC

SEQ ID NO: 336 - protein, 13 aa, Artificial Sequence
  Synthetically generated peptide
CCEYCCPPACTGC

SEQ ID NO: 337 - protein, 13 aa, Artificial Sequence
  Synthetically generated peptide
CCEYCCMPACTGC

SEQ ID NO: 338 - protein, 13 aa, Artificial Sequence
  Synthetically generated peptide
CCEYCCFPACTGC

SEQ ID NO: 339 - protein, 13 aa, Artificial Sequence
  Synthetically generated peptide
CCEYCCWPACTGC

SEQ ID NO: 340 - protein, 13 aa, Artificial Sequence
  Synthetically generated peptide
CCEYCCGPACTGC

SEQ ID NO: 341 - protein, 13 aa, Artificial Sequence
  Synthetically generated peptide
CCEYCCSPACTGC

SEQ ID NO: 342 - protein, 13 aa, Artificial Sequence
  Synthetically generated peptide
CCEYCCTPACTGC

SEQ ID NO: 343 - protein, 13 aa, Artificial Sequence
  Synthetically generated peptide
CCEYCCCPACTGC

SEQ ID NO: 344 - protein, 13 aa, Artificial Sequence
  Synthetically generated peptide
CCEYCCQPACTGC

SEQ ID NO: 345 - protein, 13 aa, Artificial Sequence
  Synthetically generated peptide
CCEYCCYPACTGC

SEQ ID NO: 346 - protein, 13 aa, Artificial Sequence
  Synthetically generated peptide
CCEYCCDPACTGC

SEQ ID NO: 347 - protein, 13 aa, Artificial Sequence
  Synthetically generated peptide
CCEYCCEPACTGC

SEQ ID NO: 348 - protein, 13 aa, Artificial Sequence
  Synthetically generated peptide
CCEYCCKPACTGC

SEQ ID NO: 349 - protein, 13 aa, Artificial Sequence
  Synthetically generated peptide
CCEYCCRPACTGC

SEQ ID NO: 350 - protein, 13 aa, Artificial Sequence
  Synthetically generated peptide
CCEYCCHPACTGC

SEQ ID NO: 351 - protein, 14 aa, Artificial Sequence
  Synthetically generated peptide
CCELCCNPTCTGCY

SEQ ID NO: 352 - protein, 14 aa, Artificial Sequence
  Synthetically generated peptide
CCEYCCNPTCTGCY

SEQ ID NO: 353 - protein, 13 aa, Artificial Sequence
  Synthetically generated peptide
CCELCCNPTCTGC

SEQ ID NO: 354 - protein, 13 aa, Artificial Sequence
  Synthetically generated peptide
CCEYCCNPTCTGC

SEQ ID NO: 355 - protein, 14 aa, Artificial Sequence
  Synthetically generated peptide
CCEFCCNPTCTGCY

SEQ ID NO: 356 - protein, 13 aa, Artificial Sequence
  Synthetically generated peptide
CCEFCCNPTCTGC

SEQ ID NO: 357 - protein, 14 aa, Artificial Sequence
  Synthetically generated peptide
CCEWCCNPTCTGCY

SEQ ID NO: 358 - protein, 13 aa, Artificial Sequence
  Synthetically generated peptide
CCEWCCNPTCTGC

SEQ ID NO: 359 - protein, 14 aa, Artificial Sequence
  Synthetically generated peptide
CCELCCNGACTGCY

SEQ ID NO: 360 - protein, 14 aa, Artificial Sequence
  Synthetically generated peptide
CCEYCCNGACTGCY

SEQ ID NO: 361 - protein, 13 aa, Artificial Sequence
  Synthetically generated peptide
CCELCCNGACTGC

SEQ ID NO: 362 - protein, 13 aa, Artificial Sequence
  Synthetically generated peptide
CCEYCCNGACTGC

SEQ ID NO: 363 - protein, 14 aa, Artificial Sequence
  Synthetically generated peptide
CCEFCCNGACTGCY

SEQ ID NO: 364 - protein, 13 aa, Artificial Sequence
  Synthetically generated peptide
CCEFCCNGACTGC

SEQ ID NO: 365 - protein, 14 aa, Artificial Sequence
  Synthetically generated peptide
CCEWCCNGACTGCY

SEQ ID NO: 366 - protein, 13 aa, Artificial Sequence
  Synthetically generated peptide
CCEWCCNGACTGC

SEQ ID NO: 367 - protein, 14 aa, Artificial Sequence
  Synthetically generated peptide
CCELCCNPACVGCY

SEQ ID NO: 368 - protein, 14 aa, Artificial Sequence
  Synthetically generated peptide
CCEYCCNPACVGCY

SEQ ID NO: 369 - protein, 13 aa, Artificial Sequence
  Synthetically generated peptide
CCELCCNPACVGC

SEQ ID NO: 370 - protein, 13 aa, Artificial Sequence
  Synthetically generated peptide
CCEYCCNPACVGC

SEQ ID NO: 371 - protein, 14 aa, Artificial Sequence
  Synthetically generated peptide
CCEFCCNPACVGCY

SEQ ID NO: 372 - protein, 13 aa, Artificial Sequence
  Synthetically generated peptide
CCEFCCNPACVGC

SEQ ID NO: 373 - protein, 14 aa, Artificial Sequence
  Synthetically generated peptide
CCEWCCNPACVGCY

SEQ ID NO: 374 - protein, 13 aa, Artificial Sequence
  Synthetically generated peptide
CCEWCCNPACVGC

SEQ ID NO: 375 - protein, 14 aa, Artificial Sequence
  Synthetically generated peptide
CCELCCNPACGGCY

SEQ ID NO: 376 - protein, 14 aa, Artificial Sequence
  Synthetically generated peptide
CCEYCCNPACGGCY

SEQ ID NO: 377 - protein, 13 aa, Artificial Sequence
  Synthetically generated peptide
CCELCCNPACGGC

SEQ ID NO: 378 - protein, 13 aa, Artificial Sequence
  Synthetically generated peptide
CCEYCCNPACGGC

SEQ ID NO: 379 - protein, 14 aa, Artificial Sequence
  Synthetically generated peptide
CCEFCCNPACGGCY

SEQ ID NO: 380 - protein, 13 aa, Artificial Sequence
  Synthetically generated peptide
CCEFCCNPACGGC

SEQ ID NO: 381 - protein, 14 aa, Artificial Sequence
  Synthetically generated peptide
CCEWCCNPACGGCY

SEQ ID NO: 382 - protein, 13 aa, Artificial Sequence
  Synthetically generated peptide
CCEWCCNPACGGC

SEQ ID NO: 383 - protein, 14 aa, Artificial Sequence
  Synthetically generated peptide
CCELCCNPACTACY

SEQ ID NO: 384 - protein, 14 aa, Artificial Sequence
  Synthetically generated peptide
CCEYCCNPACTACY

SEQ ID NO: 385 - protein, 13 aa, Artificial Sequence
  Synthetically generated peptide
CCELCCNPACTAC

SEQ ID NO: 386 - protein, 13 aa, Artificial Sequence
  Synthetically generated peptide
CCEYCCNPACTAC

SEQ ID NO: 387 - protein, 14 aa, Artificial Sequence
  Synthetically generated peptide
CCEWCCNPACTACY

SEQ ID NO: 388 - protein, 13 aa, Artificial Sequence
  Synthetically generated peptide
CCEWCCNPACTAC

SEQ ID NO: 389 - protein, 14 aa, Artificial Sequence
  Synthetically generated peptide
CCEFCCNPACTACY

SEQ ID NO: 390 - protein, 13 aa, Artificial Sequence
  Synthetically generated peptide
CCEFCCNPACTAC

SEQ ID NO: 391 - protein, 14 aa, Artificial Sequence
  Synthetically generated peptide
CCELCCNPACTGCA

SEQ ID NO: 392 - protein, 14 aa, Artificial Sequence
  Synthetically generated peptide
CCELCCNPACTGCV

SEQ ID NO: 393 - protein, 14 aa, Artificial Sequence
  Synthetically generated peptide
CCELCCNPACTGCL

SEQ ID NO: 394 - protein, 14 aa, Artificial Sequence
  Synthetically generated peptide
CCELCCNPACTGCI

SEQ ID NO: 395 - protein, 14 aa, Artificial Sequence
  Synthetically generated peptide
CCELCCNPACTGCP

SEQ ID NO: 396 - protein, 14 aa, Artificial Sequence
  Synthetically generated peptide
CCELCCNPACTGCM

SEQ ID NO: 397 - protein, 14 aa, Artificial Sequence
  Synthetically generated peptide
CCELCCNPACTGCF

SEQ ID NO: 398 - protein, 14 aa, Artificial Sequence
  Synthetically generated peptide
CCELCCNPACTGCW

SEQ ID NO: 399 - protein, 14 aa, Artificial Sequence
  Synthetically generated peptide
CCELCCNPACTGCG

SEQ ID NO: 400 - protein, 14 aa, Artificial Sequence
  Synthetically generated peptide
CCELCCNPACTGCS

SEQ ID NO: 401 - protein, 14 aa, Artificial Sequence
  Synthetically generated peptide
CCELCCNPACTGCT

SEQ ID NO: 402 - protein, 14 aa, Artificial Sequence
  Synthetically generated peptide
CCELCCNPACTGCC

SEQ ID NO: 403 - protein, 14 aa, Artificial Sequence
  Synthetically generated peptide
CCELCCNPACTGCN

SEQ ID NO: 404 - protein, 14 aa, Artificial Sequence
  Synthetically generated peptide
CCELCCNPACTGCQ

SEQ ID NO: 405 - protein, 14 aa, Artificial Sequence
  Synthetically generated peptide
CCELCCNPACTGCD

SEQ ID NO: 406 - protein, 14 aa, Artificial Sequence
  Synthetically generated peptide
CCELCCNPACTGCE

SEQ ID NO: 407 - protein, 14 aa, Artificial Sequence
  Synthetically generated peptide
CCELCCNPACTGCK

SEQ ID NO: 408 - protein, 14 aa, Artificial Sequence
  Synthetically generated peptide
CCELCCNPACTGCR

SEQ ID NO: 409 - protein, 14 aa, Artificial Sequence
  Synthetically generated peptide
CCELCCNPACTGCH

SEQ ID NO: 410 - protein, 14 aa, Artificial Sequence
  Synthetically generated peptide
CCEYCCNPACTGCA

SEQ ID NO: 411 - protein, 14 aa, Artificial Sequence
  Synthetically generated peptide
CCEYCCNPACTGCV

SEQ ID NO: 412 - protein, 14 aa, Artificial Sequence
  Synthetically generated peptide
CCEYCCNPACTGCL

SEQ ID NO: 413 - protein, 14 aa, Artificial Sequence
  Synthetically generated peptide
CCEYCCNPACTGCI

SEQ ID NO: 414 - protein, 14 aa, Artificial Sequence
  Synthetically generated peptide
CCEYCCNPACTGCP

SEQ ID NO: 415 - protein, 14 aa, Artificial Sequence
  Synthetically generated peptide
CCEYCCNPACTGCM

SEQ ID NO: 416 - protein, 14 aa, Artificial Sequence
  Synthetically generated peptide
CCEYCCNPACTGCF

SEQ ID NO: 417 - protein, 14 aa, Artificial Sequence
  Synthetically generated peptide
CCEYCCNPACTGCW

SEQ ID NO: 418 - protein, 14 aa, Artificial Sequence
  Synthetically generated peptide
CCEYCCNPACTGCG

SEQ ID NO: 419 - protein, 14 aa, Artificial Sequence
  Synthetically generated peptide
CCEYCCNPACTGCS

SEQ ID NO: 420 - protein, 14 aa, Artificial Sequence
  Synthetically generated peptide
CCEYCCNPACTGCT

SEQ ID NO: 421 - protein, 14 aa, Artificial Sequence
  Synthetically generated peptide
CCEYCCNPACTGCC

SEQ ID NO: 422 - protein, 14 aa, Artificial Sequence
  Synthetically generated peptide
CCEYCCNPACTGCN

SEQ ID NO: 423 - protein, 14 aa, Artificial Sequence
  Synthetically generated peptide
CCEYCCNPACTGCQ

SEQ ID NO: 424 - protein, 14 aa, Artificial Sequence
  Synthetically generated peptide
CCEYCCNPACTGCD

SEQ ID NO: 425 - protein, 14 aa, Artificial Sequence
  Synthetically generated peptide
CCEYCCNPACTGCE

SEQ ID NO: 426 - protein, 14 aa, Artificial Sequence
  Synthetically generated peptide
CCEYCCNPACTGCK

SEQ ID NO: 427 - protein, 14 aa, Artificial Sequence
  Synthetically generated peptide
CCEYCCNPACTGCR

SEQ ID NO: 428 - protein, 14 aa, Artificial Sequence
  Synthetically generated peptide
CCEYCCNPACTGCH

SEQ ID NO: 429 - protein, 14 aa, Artificial Sequence
  Synthetically generated peptide
CCALCCNPACTGCY

SEQ ID NO: 430 - protein, 14 aa, Artificial Sequence
  Synthetically generated peptide
CCVLCCNPACTGCY

SEQ ID NO: 431 - protein, 14 aa, Artificial Sequence
  Synthetically generated peptide
CCLLCCNPACTGCY

SEQ ID NO: 432 - protein, 14 aa, Artificial Sequence
  Synthetically generated peptide
CCILCCNPACTGCY

SEQ ID NO: 433 - protein, 14 aa, Artificial Sequence
  Synthetically generated peptide
CCMLCCNPACTGCY

SEQ ID NO: 434 - protein, 14 aa, Artificial Sequence
  Synthetically generated peptide
CCFLCCNPACTGCY

SEQ ID NO: 435 - protein, 14 aa, Artificial Sequence
  Synthetically generated peptide
CCWLCCNPACTGCY

SEQ ID NO: 436 - protein, 14 aa, Artificial Sequence
  Synthetically generated peptide
CCGLCCNPACTGCY

SEQ ID NO: 437 - protein, 14 aa, Artificial Sequence
  Synthetically generated peptide
CCSLCCNPACTGCY

SEQ ID NO: 438 - protein, 14 aa, Artificial Sequence
  Synthetically generated peptide
CCTLCCNPACTGCY

SEQ ID NO: 439 - protein, 14 aa, Artificial Sequence
  Synthetically generated peptide
CCCLCCNPACTGCY

SEQ ID NO: 440 - protein, 14 aa, Artificial Sequence
  Synthetically generated peptide
CCNLCCNPACTGCY

SEQ ID NO: 441 - protein, 14 aa, Artificial Sequence
  Synthetically generated peptide
CCQLCCNPACTGCY

SEQ ID NO: 442 - protein, 14 aa, Artificial Sequence
  Synthetically generated peptide
CCYLCCNPACTGCY

SEQ ID NO: 443 - protein, 14 aa, Artificial Sequence
  Synthetically generated peptide
CCDLCCNPACTGCY

SEQ ID NO: 444 - protein, 14 aa, Artificial Sequence
  Synthetically generated peptide
CCKLCCNPACTGCY

SEQ ID NO: 445 - protein, 14 aa, Artificial Sequence
  Synthetically generated peptide
CCRLCCNPACTGCY

SEQ ID NO: 446 - protein, 14 aa, Artificial Sequence
  Synthetically generated peptide
CCHLCCNPACTGCY

SEQ ID NO: 447 - protein, 13 aa, Artificial Sequence
  Synthetically generated peptide
CCALCCNPACTGC

SEQ ID NO: 448 - protein, 13 aa, Artificial Sequence
  Synthetically generated peptide
CCVLCCNPACTGC

SEQ ID NO: 449 - protein, 13 aa, Artificial Sequence
  Synthetically generated peptide
CCLLCCNPACTGC

SEQ ID NO: 450 - protein, 13 aa, Artificial Sequence
  Synthetically generated peptide
CCILCCNPACTGC

SEQ ID NO: 451 - protein, 13 aa, Artificial Sequence
  Synthetically generated peptide
CCMLCCNPACTGC

SEQ ID NO: 452 - protein, 13 aa, Artificial Sequence
  Synthetically generated peptide
CCFLCCNPACTGC

SEQ ID NO: 453 - protein, 13 aa, Artificial Sequence
  Synthetically generated peptide
CCWLCCNPACTGC

SEQ ID NO: 454 - protein, 13 aa, Artificial Sequence
  Synthetically generated peptide
CCGLCCNPACTGC

SEQ ID NO: 455 - protein, 13 aa, Artificial Sequence
  Synthetically generated peptide
CCSLCCNPACTGC

SEQ ID NO: 456 - protein, 13 aa, Artificial Sequence
  Synthetically generated peptide
CCTLCCNPACTGC

SEQ ID NO: 457 - protein, 13 aa, Artificial Sequence
  Synthetically generated peptide
CCCLCCNPACTGC

SEQ ID NO: 458 - protein, 13 aa, Artificial Sequence
  Synthetically generated peptide
CCNLCCNPACTGC

SEQ ID NO: 459 - protein, 13 aa, Artificial Sequence
  Synthetically generated peptide
CCQLCCNPACTGC

SEQ ID NO: 460 - protein, 13 aa, Artificial Sequence
  Synthetically generated peptide
CCYLCCNPACTGC

SEQ ID NO: 461 - protein, 13 aa, Artificial Sequence
  Synthetically generated peptide
CCDLCCNPACTGC

SEQ ID NO: 462 - protein, 13 aa, Artificial Sequence
  Synthetically generated peptide
CCKLCCNPACTGC

SEQ ID NO: 463 - protein, 13 aa, Artificial Sequence
  Synthetically generated peptide
CCRLCCNPACTGC

SEQ ID NO: 464 - protein, 13 aa, Artificial Sequence
  Synthetically generated peptide
CCHLCCNPACTGC

SEQ ID NO: 465 - protein, 14 aa, Artificial Sequence
  Synthetically generated peptide
CCAYCCNPACTGCY

SEQ ID NO: 466 - protein, 14 aa, Artificial Sequence
  Synthetically generated peptide
CCVYCCNPACTGCY

SEQ ID NO: 467 - protein, 14 aa, Artificial Sequence
  Synthetically generated peptide
CCLYCCNPACTGCY

SEQ ID NO: 468 - protein, 14 aa, Artificial Sequence
  Synthetically generated peptide
CCIYCCNPACTGCY

SEQ ID NO: 469 - protein, 14 aa, Artificial Sequence
  Synthetically generated peptide
CCMYCCNPACTGCY

SEQ ID NO: 470 - protein, 14 aa, Artificial Sequence
  Synthetically generated peptide
CCFYCCNPACTGCY

SEQ ID NO: 471 - protein, 14 aa, Artificial Sequence
  Synthetically generated peptide
CCWYCCNPACTGCY

SEQ ID NO: 472 - protein, 14 aa, Artificial Sequence
  Synthetically generated peptide
CCGYCCNPACTGCY

SEQ ID NO: 473 - protein, 14 aa, Artificial Sequence
  Synthetically generated peptide
CCSYCCNPACTGCY

SEQ ID NO: 474 - protein, 14 aa, Artificial Sequence
  Synthetically generated peptide
CCTYCCNPACTGCY

SEQ ID NO: 475 - protein, 14 aa, Artificial Sequence
  Synthetically generated peptide
CCCYCCNPACTGCY

SEQ ID NO: 476 - protein, 14 aa, Artificial Sequence
  Synthetically generated peptide
CCNYCCNPACTGCY

SEQ ID NO: 477 - protein, 14 aa, Artificial Sequence
  Synthetically generated peptide
CCQYCCNPACTGCY

SEQ ID NO: 478 - protein, 14 aa, Artificial Sequence
  Synthetically generated peptide
CCYYCCNPACTGCY

SEQ ID NO: 479 - protein, 14 aa, Artificial Sequence
  Synthetically generated peptide
CCDYCCNPACTGCY

SEQ ID NO: 480 - protein, 14 aa, Artificial Sequence
  Synthetically generated peptide
CCKYCCNPACTGCY

SEQ ID NO: 481 - protein, 14 aa, Artificial Sequence
  Synthetically generated peptide
CCRYCCNPACTGCY

SEQ ID NO: 482 - protein, 14 aa, Artificial Sequence
  Synthetically generated peptide
CCHYCCNPACTGCY

SEQ ID NO: 483 - protein, 13 aa, Artificial Sequence
  Synthetically generated peptide
CCAYCCNPACTGC

SEQ ID NO: 484 - protein, 13 aa, Artificial Sequence
  Synthetically generated peptide
CCVYCCNPACTGC

SEQ ID NO: 485 - protein, 13 aa, Artificial Sequence
  Synthetically generated peptide
CCLYCCNPACTGC

SEQ ID NO: 486 - protein, 13 aa, Artificial Sequence
  Synthetically generated peptide
CCIYCCNPACTGC

SEQ ID NO: 487 - protein, 13 aa, Artificial Sequence
  Synthetically generated peptide
CCMYCCNPACTGC

SEQ ID NO: 488 - protein, 13 aa, Artificial Sequence
  Synthetically generated peptide
CCFYCCNPACTGC

SEQ ID NO: 489 - protein, 13 aa, Artificial Sequence
  Synthetically generated peptide
CCWYCCNPACTGC

SEQ ID NO: 490 - protein, 13 aa, Artificial Sequence
  Synthetically generated peptide
CCGYCCNPACTGC

SEQ ID NO: 491 - protein, 13 aa, Artificial Sequence
  Synthetically generated peptide
CCSYCCNPACTGC

SEQ ID NO: 492 - protein, 13 aa, Artificial Sequence
  Synthetically generated peptide
CCTYCCNPACTGC

SEQ ID NO: 493 - protein, 13 aa, Artificial Sequence
  Synthetically generated peptide
CCCYCCNPACTGC

SEQ ID NO: 494 - protein, 13 aa, Artificial Sequence
  Synthetically generated peptide
CCNYCCNPACTGC

SEQ ID NO: 495 - protein, 13 aa, Artificial Sequence
  Synthetically generated peptide
CCQYCCNPACTGC

SEQ ID NO: 496 - protein, 13 aa, Artificial Sequence
  Synthetically generated peptide
CCYYCCNPACTGC

SEQ ID NO: 497 - protein, 13 aa, Artificial Sequence
  Synthetically generated peptide
CCDYCCNPACTGC

SEQ ID NO: 498 - protein, 13 aa, Artificial Sequence
  Synthetically generated peptide
CCKYCCNPACTGC

SEQ ID NO: 499 - protein, 13 aa, Artificial Sequence
  Synthetically generated peptide
CCRYCCNPACTGC

SEQ ID NO: 500 - protein, 13 aa, Artificial Sequence
  Synthetically generated peptide
CCHYCCNPACTGC

SEQ ID NO: 501 - protein, 14 aa, Artificial Sequence
  Synthetically generated peptide
CCEFCCAPACTGCY

SEQ ID NO: 502 - protein, 14 aa, Artificial Sequence
  Synthetically generated peptide
CCEFCCVPACTGCY

SEQ ID NO: 503 - protein, 14 aa, Artificial Sequence
  Synthetically generated peptide
CCEFCCLPACTGCY

SEQ ID NO: 504 - protein, 14 aa, Artificial Sequence
  Synthetically generated peptide
CCEFCCIPACTGCY

SEQ ID NO: 505 - protein, 14 aa, Artificial Sequence
  Synthetically generated peptide
CCEFCCPPACTGCY

SEQ ID NO: 506 - protein, 14 aa, Artificial Sequence
  Synthetically generated peptide
CCEFCCMPACTGCY

SEQ ID NO: 507 - protein, 14 aa, Artificial Sequence
  Synthetically generated peptide
CCEFCCFPACTGCY

SEQ ID NO: 508 - protein, 14 aa, Artificial Sequence
  Synthetically generated peptide
CCEFCCWPACTGCY

SEQ ID NO: 509 - protein, 14 aa, Artificial Sequence
  Synthetically generated peptide
CCEFCCGPACTGCY

SEQ ID NO: 510 - protein, 14 aa, Artificial Sequence
  Synthetically generated peptide
CCEFCCSPACTGCY

SEQ ID NO: 511 - protein, 14 aa, Artificial Sequence
  Synthetically generated peptide
CCEFCCTPACTGCY

SEQ ID NO: 512 - protein, 14 aa, Artificial Sequence
  Synthetically generated peptide
CCEFCCCPACTGCY

SEQ ID NO: 513 - protein, 14 aa, Artificial Sequence
  Synthetically generated peptide
CCEFCCQPACTGCY

SEQ ID NO: 514 - protein, 14 aa, Artificial Sequence
  Synthetically generated peptide
CCEFCCYPACTGCY

SEQ ID NO: 515 - protein, 14 aa, Artificial Sequence
  Synthetically generated peptide
CCEFCCDPACTGCY

SEQ ID NO: 516 - protein, 14 aa, Artificial Sequence
  Synthetically generated peptide
CCEFCCEPACTGCY

SEQ ID NO: 517 - protein, 14 aa, Artificial Sequence
  Synthetically generated peptide
CCEFCCKPACTGCY

SEQ ID NO: 518 - protein, 14 aa, Artificial Sequence
  Synthetically generated peptide
CCEFCCRPACTGCY

SEQ ID NO: 519 - protein, 14 aa, Artificial Sequence
  Synthetically generated peptide
CCEFCCHPACTGCY

SEQ ID NO: 520 - protein, 13 aa, Artificial Sequence
  Synthetically generated peptide
CCEFCCAPACTGC

SEQ ID NO: 521 - protein, 13 aa, Artificial Sequence
  Synthetically generated peptide
CCEFCCVPACTGC

SEQ ID NO: 522 - protein, 13 aa, Artificial Sequence
  Synthetically generated peptide
CCEFCCLPACTGC

SEQ ID NO: 523 - protein, 13 aa, Artificial Sequence
  Synthetically generated peptide
CCEFCCIPACTGC

SEQ ID NO: 524 - protein, 13 aa, Artificial Sequence
  Synthetically generated peptide
CCEFCCPPACTGC

SEQ ID NO: 525 - protein, 13 aa, Artificial Sequence
  Synthetically generated peptide
CCEFCCMPACTGC

SEQ ID NO: 526 - protein, 13 aa, Artificial Sequence
  Synthetically generated peptide
CCEFCCFPACTGC

SEQ ID NO: 527 - protein, 13 aa, Artificial Sequence
  Synthetically generated peptide
CCEFCCWPACTGC

SEQ ID NO: 528 - protein, 13 aa, Artificial Sequence
  Synthetically generated peptide
CCEFCCGPACTGC

SEQ ID NO: 529 - protein, 13 aa, Artificial Sequence
  Synthetically generated peptide
CCEFCCSPACTGC

SEQ ID NO: 530 - protein, 13 aa, Artificial Sequence
  Synthetically generated peptide
CCEFCCTPACTGC

SEQ ID NO: 531 - protein, 13 aa, Artificial Sequence
  Synthetically generated peptide
CCEFCCCPACTGC

SEQ ID NO: 532 - protein, 13 aa, Artificial Sequence
  Synthetically generated peptide
CCEFCCQPACTGC

SEQ ID NO: 533 - protein, 13 aa, Artificial Sequence
  Synthetically generated peptide
CCEFCCYPACTGC

SEQ ID NO: 534 - protein, 13 aa, Artificial Sequence
  Synthetically generated peptide
CCEFCCDPACTGC

SEQ ID NO: 535 - protein, 13 aa, Artificial Sequence
  Synthetically generated peptide
CCEFCCEPACTGC

SEQ ID NO: 536 - protein, 13 aa, Artificial Sequence
  Synthetically generated peptide
CCEFCCKPACTGC

SEQ ID NO: 537 - protein, 13 aa, Artificial Sequence
  Synthetically generated peptide
CCEFCCRPACTGC

SEQ ID NO: 538 - protein, 13 aa, Artificial Sequence
  Synthetically generated peptide
CCEFCCHPACTGC

SEQ ID NO: 539 - protein, 14 aa, Artificial Sequence
  Synthetically generated peptide
CCEWCCAPACTGCY

SEQ ID NO: 540 - protein, 14 aa, Artificial Sequence
  Synthetically generated peptide
CCEWCCVPACTGCY

SEQ ID NO: 541 - protein, 14 aa, Artificial Sequence
  Synthetically generated peptide
CCEWCCLPACTGCY

SEQ ID NO: 542 - protein, 14 aa, Artificial Sequence
  Synthetically generated peptide
CCEWCCIPACTGCY

SEQ ID NO: 543 - protein, 14 aa, Artificial Sequence
  Synthetically generated peptide
CCEWCCPPACTGCY

SEQ ID NO: 544 - protein, 14 aa, Artificial Sequence
  Synthetically generated peptide
CCEWCCMPACTGCY

SEQ ID NO: 545 - protein, 14 aa, Artificial Sequence
  Synthetically generated peptide
CCEWCCFPACTGCY

SEQ ID NO: 546 - protein, 14 aa, Artificial Sequence
  Synthetically generated peptide
CCEWCCWPACTGCY

SEQ ID NO: 547 - protein, 14 aa, Artificial Sequence
  Synthetically generated peptide
CCEWCCGPACTGCY

SEQ ID NO: 548 - protein, 14 aa, Artificial Sequence
  Synthetically generated peptide
CCEWCCSPACTGCY

SEQ ID NO: 549 - protein, 14 aa, Artificial Sequence
  Synthetically generated peptide
CCEWCCTPACTGCY

SEQ ID NO: 550 - protein, 14 aa, Artificial Sequence
  Synthetically generated peptide
CCEWCCCPACTGCY

SEQ ID NO: 551 - protein, 14 aa, Artificial Sequence
  Synthetically generated peptide
CCEWCCQPACTGCY

SEQ ID NO: 552 - protein, 14 aa, Artificial Sequence
  Synthetically generated peptide
CCEWCCYPACTGCY

SEQ ID NO: 553 - protein, 14 aa, Artificial Sequence
  Synthetically generated peptide
CCEWCCDPACTGCY

SEQ ID NO: 554 - protein, 14 aa, Artificial Sequence
  Synthetically generated peptide
CCEWCCEPACTGCY

SEQ ID NO: 555 - protein, 14 aa, Artificial Sequence
  Synthetically generated peptide
CCEWCCKPACTGCY

SEQ ID NO: 556 - protein, 14 aa, Artificial Sequence
  Synthetically generated peptide
CCEWCCRPACTGCY

SEQ ID NO: 557 - protein, 14 aa, Artificial Sequence
  Synthetically generated peptide
CCEWCCHPACTGCY

SEQ ID NO: 558 - protein, 13 aa, Artificial Sequence
  Synthetically generated peptide
CCEWCCAPACTGC

SEQ ID NO: 559 - protein, 13 aa, Artificial Sequence
  Synthetically generated peptide
CCEWCCVPACTGC

SEQ ID NO: 560 - protein, 13 aa, Artificial Sequence
  Synthetically generated peptide
CCEWCCLPACTGC

SEQ ID NO: 561 - protein, 13 aa, Artificial Sequence
  Synthetically generated peptide
CCEWCCIPACTGC

SEQ ID NO: 562 - protein, 13 aa, Artificial Sequence
  Synthetically generated peptide
CCEWCCPPACTGC

SEQ ID NO: 563 - protein, 13 aa, Artificial Sequence
  Synthetically generated peptide
CCEWCCMPACTGC

SEQ ID NO: 564 - protein, 13 aa, Artificial Sequence
  Synthetically generated peptide
CCEWCCFPACTGC

SEQ ID NO: 565 - protein, 13 aa, Artificial Sequence
  Synthetically generated peptide
CCEWCCWPACTGC

SEQ ID NO: 566 - protein, 13 aa, Artificial Sequence
  Synthetically generated peptide
CCEWCCGPACTGC

SEQ ID NO: 567 - protein, 13 aa, Artificial Sequence
  Synthetically generated peptide
CCEWCCSPACTGC

SEQ ID NO: 568 - protein, 13 aa, Artificial Sequence
  Synthetically generated peptide
CCEWCCTPACTGC

SEQ ID NO: 569 - protein, 13 aa, Artificial Sequence
  Synthetically generated peptide
CCEWCCCPACTGC

SEQ ID NO: 570 - protein, 13 aa, Artificial Sequence
  Synthetically generated peptide
CCEWCCQPACTGC

SEQ ID NO: 571 - protein, 13 aa, Artificial Sequence
  Synthetically generated peptide
CCEWCCYPACTGC

SEQ ID NO: 572 - protein, 13 aa, Artificial Sequence
  Synthetically generated peptide
CCEWCCDPACTGC

SEQ ID NO: 573 - protein, 13 aa, Artificial Sequence
  Synthetically generated peptide
CCEWCCEPACTGC

SEQ ID NO: 574 - protein, 13 aa, Artificial Sequence
  Synthetically generated peptide
CCEWCCKPACTGC

SEQ ID NO: 575 - protein, 13 aa, Artificial Sequence
  Synthetically generated peptide
CCEWCCRPACTGC

SEQ ID NO: 576 - protein, 13 aa, Artificial Sequence
  Synthetically generated peptide
CCEWCCHPACTGC

SEQ ID NO: 577 - protein, 14 aa, Artificial Sequence
  Synthetically generated peptide
CCEWCCNPACTGCA

SEQ ID NO: 578 - protein, 14 aa, Artificial Sequence
  Synthetically generated peptide
CCEWCCNPACTGCV

SEQ ID NO: 579 - protein, 14 aa, Artificial Sequence
  Synthetically generated peptide
CCEWCCNPACTGCL

SEQ ID NO: 580 - protein, 14 aa, Artificial Sequence
  Synthetically generated peptide
CCEWCCNPACTGCI

SEQ ID NO: 581 - protein, 14 aa, Artificial Sequence
  Synthetically generated peptide
CCEWCCNPACTGCP

SEQ ID NO: 582 - protein, 14 aa, Artificial Sequence
  Synthetically generated peptide
CCEWCCNPACTGCM

SEQ ID NO: 583 - protein, 14 aa, Artificial Sequence
  Synthetically generated peptide
CCEWCCNPACTGCF

SEQ ID NO: 584 - protein, 14 aa, Artificial Sequence
  Synthetically generated peptide
CCEWCCNPACTGCW

SEQ ID NO: 585 - protein, 14 aa, Artificial Sequence
  Synthetically generated peptide
CCEWCCNPACTGCG

SEQ ID NO: 586 - protein, 14 aa, Artificial Sequence
  Synthetically generated peptide
CCEWCCNPACTGCS

SEQ ID NO: 587 - protein, 14 aa, Artificial Sequence
  Synthetically generated peptide
CCEWCCNPACTGCT

SEQ ID NO: 588 - protein, 14 aa, Artificial Sequence
  Synthetically generated peptide
CCEWCCNPACTGCC

SEQ ID NO: 589 - protein, 14 aa, Artificial Sequence
  Synthetically generated peptide
CCEWCCNPACTGCN

SEQ ID NO: 590 - protein, 14 aa, Artificial Sequence
  Synthetically generated peptide
CCEWCCNPACTGCQ

SEQ ID NO: 591 - protein, 14 aa, Artificial Sequence
  Synthetically generated peptide
CCEWCCNPACTGCD

SEQ ID NO: 592 - protein, 14 aa, Artificial Sequence
  Synthetically generated peptide
CCEWCCNPACTGCE

SEQ ID NO: 593 - protein, 14 aa, Artificial Sequence
  Synthetically generated peptide
CCEWCCNPACTGCK

SEQ ID NO: 594 - protein, 14 aa, Artificial Sequence
  Synthetically generated peptide
CCEWCCNPACTGCR

SEQ ID NO: 595 - protein, 14 aa, Artificial Sequence
  Synthetically generated peptide
CCEWCCNPACTGCH

SEQ ID NO: 596 - protein, 14 aa, Artificial Sequence
  Synthetically generated peptide
CCEFCCNPACTGCA

SEQ ID NO: 597 - protein, 14 aa, Artificial Sequence
  Synthetically generated peptide
CCEFCCNPACTGCV

SEQ ID NO: 598 - protein, 14 aa, Artificial Sequence
  Synthetically generated peptide
CCEFCCNPACTGCL

SEQ ID NO: 599 - protein, 14 aa, Artificial Sequence
  Synthetically generated peptide
CCEFCCNPACTGCI

SEQ ID NO: 600 - protein, 14 aa, Artificial Sequence
  Synthetically generated peptide
CCEFCCNPACTGCP

SEQ ID NO: 601 - protein, 14 aa, Artificial Sequence
  Synthetically generated peptide
CCEFCCNPACTGCM

SEQ ID NO: 602 - protein, 14 aa, Artificial Sequence
  Synthetically generated peptide
CCEFCCNPACTGCF

SEQ ID NO: 603 - protein, 14 aa, Artificial Sequence
  Synthetically generated peptide
CCEFCCNPACTGCW

SEQ ID NO: 604 - protein, 14 aa, Artificial Sequence
  Synthetically generated peptide
CCEFCCNPACTGCG

SEQ ID NO: 605 - protein, 14 aa, Artificial Sequence
  Synthetically generated peptide
CCEFCCNPACTGCS

SEQ ID NO: 606 - protein, 14 aa, Artificial Sequence
  Synthetically generated peptide
CCEFCCNPACTGCT

SEQ ID NO: 607 - protein, 14 aa, Artificial Sequence
  Synthetically generated peptide
CCEFCCNPACTGCC

SEQ ID NO: 608 - protein, 14 aa, Artificial Sequence
  Synthetically generated peptide
CCEFCCNPACTGCN

SEQ ID NO: 609 - protein, 14 aa, Artificial Sequence
  Synthetically generated peptide
CCEFCCNPACTGCQ

SEQ ID NO: 610 - protein, 14 aa, Artificial Sequence
  Synthetically generated peptide
CCEFCCNPACTGCD

SEQ ID NO: 611 - protein, 14 aa, Artificial Sequence
  Synthetically generated peptide
CCEFCCNPACTGCE

SEQ ID NO: 612 - protein, 14 aa, Artificial Sequence
  Synthetically generated peptide
CCEFCCNPACTGCK

SEQ ID NO: 613 - protein, 14 aa, Artificial Sequence
  Synthetically generated peptide
CCEFCCNPACTGCR

SEQ ID NO: 614 - protein, 14 aa, Artificial Sequence
  Synthetically generated peptide
CCEFCCNPACTGCH

SEQ ID NO: 615 - protein, 14 aa, Artificial Sequence
  Synthetically generated peptide
CCAFCCNPACTGCY

SEQ ID NO: 616 - protein, 14 aa, Artificial Sequence
  Synthetically generated peptide
CCVFCCNPACTGCY

SEQ ID NO: 617 - protein, 14 aa, Artificial Sequence
  Synthetically generated peptide
CCLFCCNPACTGCY

SEQ ID NO: 618 - protein, 14 aa, Artificial Sequence
  Synthetically generated peptide
CCIFCCNPACTGCY

SEQ ID NO: 619 - protein, 14 aa, Artificial Sequence
  Synthetically generated peptide
CCMFCCNPACTGCY

SEQ ID NO: 620 - protein, 14 aa, Artificial Sequence
  Synthetically generated peptide
CCFFCCNPACTGCY

SEQ ID NO: 621 - protein, 14 aa, Artificial Sequence
  Synthetically generated peptide
CCWFCCNPACTGCY

SEQ ID NO: 622 - protein, 14 aa, Artificial Sequence
  Synthetically generated peptide
CCGFCCNPACTGCY

SEQ ID NO: 623 - protein, 14 aa, Artificial Sequence
  Synthetically generated peptide
CCSFCCNPACTGCY

SEQ ID NO: 624 - protein, 14 aa, Artificial Sequence
  Synthetically generated peptide
CCTFCCNPACTGCY

SEQ ID NO: 625 - protein, 14 aa, Artificial Sequence
  Synthetically generated peptide
CCCFCCNPACTGCY

SEQ ID NO: 626 - protein, 14 aa, Artificial Sequence
  Synthetically generated peptide
CCNFCCNPACTGCY

SEQ ID NO: 627 - protein, 14 aa, Artificial Sequence
  Synthetically generated peptide
CCQFCCNPACTGCY

SEQ ID NO: 628 - protein, 14 aa, Artificial Sequence
  Synthetically generated peptide
CCYFCCNPACTGCY

SEQ ID NO: 629 - protein, 14 aa, Artificial Sequence
  Synthetically generated peptide
CCDFCCNPACTGCY

SEQ ID NO: 630 - protein, 14 aa, Artificial Sequence
  Synthetically generated peptide
CCKFCCNPACTGCY

SEQ ID NO: 631 - protein, 14 aa, Artificial Sequence
  Synthetically generated peptide
CCRFCCNPACTGCY

SEQ ID NO: 632 - protein, 14 aa, Artificial Sequence
  Synthetically generated peptide
CCHFCCNPACTGCY

SEQ ID NO: 633 - protein, 13 aa, Artificial Sequence
  Synthetically generated peptide
CCAFCCNPACTGC

SEQ ID NO: 634 - protein, 13 aa, Artificial Sequence
  Synthetically generated peptide
CCVFCCNPACTGC

SEQ ID NO: 635 - protein, 13 aa, Artificial Sequence
  Synthetically generated peptide
CCLFCCNPACTGC

SEQ ID NO: 636 - protein, 13 aa, Artificial Sequence
  Synthetically generated peptide
CCIFCCNPACTGC

SEQ ID NO: 637 - protein, 13 aa, Artificial Sequence
  Synthetically generated peptide
CCMFCCNPACTGC

SEQ ID NO: 638 - protein, 13 aa, Artificial Sequence
  Synthetically generated peptide
CCFFCCNPACTGC

SEQ ID NO: 639 - protein, 13 aa, Artificial Sequence
  Synthetically generated peptide
CCWFCCNPACTGC

SEQ ID NO: 640 - protein, 13 aa, Artificial Sequence
  Synthetically generated peptide
CCGFCCNPACTGC

SEQ ID NO: 641 - protein, 13 aa, Artificial Sequence
  Synthetically generated peptide
CCSFCCNPACTGC

SEQ ID NO: 642 - protein, 13 aa, Artificial Sequence
  Synthetically generated peptide
CCTFCCNPACTGC

SEQ ID NO: 643 - protein, 13 aa, Artificial Sequence
  Synthetically generated peptide
CCCFCCNPACTGC

SEQ ID NO: 644 - protein, 13 aa, Artificial Sequence
  Synthetically generated peptide
CCNFCCNPACTGC

SEQ ID NO: 645 - protein, 13 aa, Artificial Sequence
  Synthetically generated peptide
CCQFCCNPACTGC

SEQ ID NO: 646 - protein, 13 aa, Artificial Sequence
  Synthetically generated peptide
CCYFCCNPACTGC

SEQ ID NO: 647 - protein, 13 aa, Artificial Sequence
  Synthetically generated peptide
CCDFCCNPACTGC

SEQ ID NO: 648 - protein, 13 aa, Artificial Sequence
  Synthetically generated peptide
CCKFCCNPACTGC

SEQ ID NO: 649 - protein, 13 aa, Artificial Sequence
  Synthetically generated peptide
CCRFCCNPACTGC

SEQ ID NO: 650 - protein, 13 aa, Artificial Sequence
  Synthetically generated peptide
CCHFCCNPACTGC

SEQ ID NO: 651 - protein, 14 aa, Artificial Sequence
  Synthetically generated peptide
CCAWCCNPACTGCY

SEQ ID NO: 652 - protein, 14 aa, Artificial Sequence
  Synthetically generated peptide
CCVWCCNPACTGCY

SEQ ID NO: 653 - protein, 14 aa, Artificial Sequence
  Synthetically generated peptide
CCLWCCNPACTGCY

SEQ ID NO: 654 - protein, 14 aa, Artificial Sequence
  Synthetically generated peptide
CCIWCCNPACTGCY

SEQ ID NO: 655 - protein, 14 aa, Artificial Sequence
  Synthetically generated peptide
CCMWCCNPACTGCY

SEQ ID NO: 656 - protein, 14 aa, Artificial Sequence
  Synthetically generated peptide
CCFWCCNPACTGCY

SEQ ID NO: 657 - protein, 14 aa, Artificial Sequence
  Synthetically generated peptide
CCWWCCNPACTGCY

SEQ ID NO: 658 - protein, 14 aa, Artificial Sequence
  Synthetically generated peptide
CCGWCCNPACTGCY

SEQ ID NO: 659 - protein, 14 aa, Artificial Sequence
  Synthetically generated peptide
CCSWCCNPACTGCY

SEQ ID NO: 660 - protein, 14 aa, Artificial Sequence
  Synthetically generated peptide
CCTWCCNPACTGCY

SEQ ID NO: 661 - protein, 14 aa, Artificial Sequence
  Synthetically generated peptide
CCCWCCNPACTGCY

SEQ ID NO: 662 - protein, 14 aa, Artificial Sequence
  Synthetically generated peptide
CCNWCCNPACTGCY

SEQ ID NO: 663 - protein, 14 aa, Artificial Sequence
  Synthetically generated peptide
CCQWCCNPACTGCY

SEQ ID NO: 664 - protein, 14 aa, Artificial Sequence
  Synthetically generated peptide
CCYWCCNPACTGCY

SEQ ID NO: 665 - protein, 14 aa, Artificial Sequence
  Synthetically generated peptide
CCDWCCNPACTGCY

SEQ ID NO: 666 - protein, 14 aa, Artificial Sequence
  Synthetically generated peptide
CCKWCCNPACTGCY

SEQ ID NO: 667 - protein, 14 aa, Artificial Sequence
  Synthetically generated peptide
CCRWCCNPACTGCY

SEQ ID NO: 668 - protein, 14 aa, Artificial Sequence
  Synthetically generated peptide
CCHWCCNPACTGCY

SEQ ID NO: 669 - protein, 13 aa, Artificial Sequence
  Synthetically generated peptide
CCAWCCNPACTGC

SEQ ID NO: 670 - protein, 13 aa, Artificial Sequence
  Synthetically generated peptide
CCVWCCNPACTGC

SEQ ID NO: 671 - protein, 13 aa, Artificial Sequence
  Synthetically generated peptide
CCLWCCNPACTGC

SEQ ID NO: 672 - protein, 13 aa, Artificial Sequence
  Synthetically generated peptide
CCIWCCNPACTGC

SEQ ID NO: 673 - protein, 13 aa, Artificial Sequence
  Synthetically generated peptide
CCMWCCNPACTGC

SEQ ID NO: 674 - protein, 13 aa, Artificial Sequence
  Synthetically generated peptide
CCFWCCNPACTGC

SEQ ID NO: 675 - protein, 13 aa, Artificial Sequence
  Synthetically generated peptide
CCWWCCNPACTGC

SEQ ID NO: 676 - protein, 13 aa, Artificial Sequence
  Synthetically generated peptide
CCGWCCNPACTGC

SEQ ID NO: 677 - protein, 13 aa, Artificial Sequence
  Synthetically generated peptide
CCSWCCNPACTGC

SEQ ID NO: 678 - protein, 13 aa, Artificial Sequence
  Synthetically generated peptide
CCTWCCNPACTGC

SEQ ID NO: 679 - protein, 13 aa, Artificial Sequence
  Synthetically generated peptide
CCCWCCNPACTGC

SEQ ID NO: 680 - protein, 13 aa, Artificial Sequence
  Synthetically generated peptide
CCNWCCNPACTGC

SEQ ID NO: 681 - protein, 13 aa, Artificial Sequence
  Synthetically generated peptide
CCQWCCNPACTGC

SEQ ID NO: 682 - protein, 13 aa, Artificial Sequence
  Synthetically generated peptide
CCYWCCNPACTGC

SEQ ID NO: 683 - protein, 13 aa, Artificial Sequence
  Synthetically generated peptide
CCDWCCNPACTGC

SEQ ID NO: 684 - protein, 13 aa, Artificial Sequence
  Synthetically generated peptide
CCKWCCNPACTGC

SEQ ID NO: 685 - protein, 13 aa, Artificial Sequence
  Synthetically generated peptide
CCRWCCNPACTGC

SEQ ID NO: 686 - protein, 13 aa, Artificial Sequence
  Synthetically generated peptide
CCHWCCNPACTGC

SEQ ID NO: 687 - protein, 12 aa, Artificial Sequence
  Synthetically generated peptide
CELCINVACTGC

SEQ ID NO: 688 - protein, 12 aa, Artificial Sequence
  Synthetically generated peptide
CELCVNVACTGC

SEQ ID NO: 689 - protein, 10 aa, Artificial Sequence
  Synthetically generated peptide
CAELCCNPAC

SEQ ID NO: 690 - protein, 13 aa, Artificial Sequence
  Synthetically generated peptide
CCGLCCNPACAGC

SEQ ID NO: 691 - protein, 13 aa, Artificial Sequence
  Synthetically generated peptide
CCGLCCYPACAGC

SEQ ID NO: 692 - protein, 12 aa, Artificial Sequence
  Synthetically generated peptide
CELCCNPACAGC

SEQ ID NO: 693 - protein, 13 aa, Artificial Sequence
  Synthetically generated peptide
CCDVCCYPACTGC

SEQ ID NO: 694 - protein, 13 aa, Artificial Sequence
  Synthetically generated peptide
CCELCCNPACAGC

SEQ ID NO: 695 - protein, 13 aa, Artificial Sequence
  Synthetically generated peptide
CCELCCYPACAGC

SEQ ID NO: 696 - protein, 13 aa, Artificial Sequence
  Synthetically generated peptide
CCELCCNPACTGC

SEQ ID NO: 697 - protein, 13 aa, Artificial Sequence
  Synthetically generated peptide
CCELCCYPACTGC

SEQ ID NO: 698 - protein, 13 aa, Artificial Sequence
  Synthetically generated peptide
CCELCCNPGCTGC

SEQ ID NO: 699 - protein, 13 aa, Artificial Sequence
  Synthetically generated peptide
CCEACCNPACTGC

SEQ ID NO: 700 - protein, 13 aa, Artificial Sequence
  Synthetically generated peptide
CCEKCCNPACTGC

SEQ ID NO: 701 - protein, 13 aa, Artificial Sequence
  Synthetically generated peptide
CCELCCNPACTAC

SEQ ID NO: 702 - protein, 13 aa, Artificial Sequence
  Synthetically generated peptide
CCPLCCNPACTGC

SEQ ID NO: 703 - protein, 13 aa, Artificial Sequence
  Synthetically generated peptide
ACELCANPACTGC

SEQ ID NO: 704 - protein, 13 aa, Artificial Sequence
  Synthetically generated peptide
CCELACNPACTGA

SEQ ID NO: 705 - protein, 12 aa, Artificial Sequence
  Synthetically generated peptide
CELCANPACTGC

SEQ ID NO: 706 - protein, 10 aa, Artificial Sequence
  Synthetically generated peptide
CCELACNPAC

SEQ ID NO: 707 - protein, 13 aa, Artificial Sequence
  Synthetically generated peptide
CCDVCCNPACAGC

SEQ ID NO: 708 - protein, 13 aa, Artificial Sequence
  Synthetically generated peptide
CCDVCCNPACTGC

SEQ ID NO: 709 - protein, 14 aa, Artificial Sequence
  Synthetically generated peptide
CCDVCCNPACAGCY

SEQ ID NO: 710 - protein, 14 aa, Artificial Sequence
  Synthetically generated peptide
CCDVCCNPACTGCY

SEQ ID NO: 711 - protein, 13 aa, Artificial Sequence
  Synthetically generated peptide
CCELCCYPACAGC

SEQ ID NO: 712 - protein, 12 aa, Artificial Sequence
  Synthetically generated peptide
CCICCNPACFGC

SEQ ID NO: 713 - protein, 11 aa, Artificial Sequence
  Synthetically generated peptide
CCNYCCSPCGC

SEQ ID NO: 714 - protein, 13 aa, Artificial Sequence
  Synthetically generated peptide
CCDVCCNPACAGC

SEQ ID NO: 715 - protein, 13 aa, Artificial Sequence
  Synthetically generated peptide
CCDACCNPACAGC

SEQ ID NO: 716 - protein, 13 aa, Artificial Sequence
  Synthetically generated peptide
CCDCCCNPACAGC

SEQ ID NO: 717 - protein, 13 aa, Artificial Sequence
  Synthetically generated peptide
CCDDCCNPACAGC

SEQ ID NO: 718 - protein, 13 aa, Artificial Sequence
  Synthetically generated peptide
CCDECCNPACAGC

SEQ ID NO: 719 - protein, 13 aa, Artificial Sequence
  Synthetically generated peptide
CCDFCCNPACAGC

SEQ ID NO: 720 - protein, 13 aa, Artificial Sequence
  Synthetically generated peptide
CCDGCCNPACAGC

SEQ ID NO: 721 - protein, 13 aa, Artificial Sequence
  Synthetically generated peptide
CCDHCCNPACAGC

SEQ ID NO: 722 - protein, 13 aa, Artificial Sequence
  Synthetically generated peptide
CCDICCNPACAGC

SEQ ID NO: 723 - protein, 13 aa, Artificial Sequence
  Synthetically generated peptide
CCDKCCNPACAGC

SEQ ID NO: 724 - protein, 13 aa, Artificial Sequence
  Synthetically generated peptide
CCDLCCNPACAGC

SEQ ID NO: 725 - protein, 13 aa, Artificial Sequence
  Synthetically generated peptide
CCDMCCNPACAGC

SEQ ID NO: 726 - protein, 13 aa, Artificial Sequence
  Synthetically generated peptide
CCDNCCNPACAGC

SEQ ID NO: 727 - protein, 13 aa, Artificial Sequence
  Synthetically generated peptide
CCDPCCNPACAGC

SEQ ID NO: 728 - protein, 13 aa, Artificial Sequence
  Synthetically generated peptide
CCDQCCNPACAGC

SEQ ID NO: 729 - protein, 13 aa, Artificial Sequence
  Synthetically generated peptide
CCDRCCNPACAGC

SEQ ID NO: 730 - protein, 13 aa, Artificial Sequence
  Synthetically generated peptide
CCDSCCNPACAGC

SEQ ID NO: 731 - protein, 13 aa, Artificial Sequence
  Synthetically generated peptide
CCDTCCNPACAGC

SEQ ID NO: 732 - protein, 13 aa, Artificial Sequence
  Synthetically generated peptide
CCDWCCNPACAGC

SEQ ID NO: 733 - protein, 13 aa, Artificial Sequence
  Synthetically generated peptide
CCDYCCNPACAGC

SEQ ID NO: 734 - protein, 13 aa, Artificial Sequence
  Synthetically generated peptide
CCEICCNPACFGC

SEQ ID NO: 735 - protein, 13 aa, Artificial Sequence
  Synthetically generated peptide
CCEACCNPACFGC

SEQ ID NO: 736 - protein, 13 aa, Artificial Sequence
  Synthetically generated peptide
CCECCCNPACFGC

SEQ ID NO: 737 - protein, 13 aa, Artificial Sequence
  Synthetically generated peptide
CCEDCCNPACFGC

SEQ ID NO: 738 - protein, 13 aa, Artificial Sequence
  Synthetically generated peptide
CCEECCNPACFGC

SEQ ID NO: 739 - protein, 13 aa, Artificial Sequence
  Synthetically generated peptide
CCEFCCNPACFGC

SEQ ID NO: 740 - protein, 13 aa, Artificial Sequence
  Synthetically generated peptide
CCEGCCNPACFGC

SEQ ID NO: 741 - protein, 13 aa, Artificial Sequence
  Synthetically generated peptide
CCEHCCNPACFGC

SEQ ID NO: 742 - protein, 13 aa, Artificial Sequence
  Synthetically generated peptide
CCEKCCNPACFGC

SEQ ID NO: 743 - protein, 13 aa, Artificial Sequence
  Synthetically generated peptide
CCELCCNPACFGC

SEQ ID NO: 744 - protein, 13 aa, Artificial Sequence
  Synthetically generated peptide
CCEMCCNPACFGC

SEQ ID NO: 745 - protein, 13 aa, Artificial Sequence
  Synthetically generated peptide
CCENCCNPACFGC

SEQ ID NO: 746 - protein, 13 aa, Artificial Sequence
  Synthetically generated peptide
CCEPCCNPACFGC

SEQ ID NO: 747 - protein, 13 aa, Artificial Sequence
  Synthetically generated peptide
CCEQCCNPACFGC

SEQ ID NO: 748 - protein, 13 aa, Artificial Sequence
  Synthetically generated peptide
CCERCCNPACFGC

SEQ ID NO: 749 - protein, 13 aa, Artificial Sequence
  Synthetically generated peptide
CCESCCNPACFGC

SEQ ID NO: 750 - protein, 13 aa, Artificial Sequence
  Synthetically generated peptide
CCETCCNPACFGC

SEQ ID NO: 751 - protein, 13 aa, Artificial Sequence
  Synthetically generated peptide
CCEVCCNPACFGC

SEQ ID NO: 752 - protein, 13 aa, Artificial Sequence
  Synthetically generated peptide
CCEWCCNPACFGC

SEQ ID NO: 753 - protein, 13 aa, Artificial Sequence
  Synthetically generated peptide
CCEYCCNPACFGC

SEQ ID NO: 754 - protein, 13 aa, Artificial Sequence
  Synthetically generated peptide
CCELCCNPACAPC

SEQ ID NO: 755 - protein, 13 aa, Artificial Sequence
  Synthetically generated peptide
CCEACCNPACAPC

SEQ ID NO: 756 - protein, 13 aa, Artificial Sequence
  Synthetically generated peptide
CCECCCNPACAPC

SEQ ID NO: 757 - protein, 13 aa, Artificial Sequence
  Synthetically generated peptide
CCEDCCNPACAPC

SEQ ID NO: 758 - protein, 13 aa, Artificial Sequence
  Synthetically generated peptide
CCEECCNPACAPC

SEQ ID NO: 759 - protein, 13 aa, Artificial Sequence
  Synthetically generated peptide
CCEFCCNPACAPC

SEQ ID NO: 760 - protein, 13 aa, Artificial Sequence
  Synthetically generated peptide
CCEGCCNPACAPC

SEQ ID NO: 761 - protein, 13 aa, Artificial Sequence
  Synthetically generated peptide
CCEHCCNPACAPC

SEQ ID NO: 762 - protein, 13 aa, Artificial Sequence
  Synthetically generated peptide
CCEICCNPACAPC

SEQ ID NO: 763 - protein, 13 aa, Artificial Sequence
  Synthetically generated peptide
CCEKCCNPACAPC

SEQ ID NO: 764 - protein, 13 aa, Artificial Sequence
  Synthetically generated peptide
CCEMCCNPACAPC

SEQ ID NO: 765 - protein, 13 aa, Artificial Sequence
  Synthetically generated peptide
CCENCCNPACAPC

SEQ ID NO: 766 - protein, 13 aa, Artificial Sequence
  Synthetically generated peptide
CCEPCCNPACAPC

SEQ ID NO: 767 - protein, 13 aa, Artificial Sequence
  Synthetically generated peptide
CCEQCCNPACAPC

SEQ ID NO: 768 - protein, 13 aa, Artificial Sequence
  Synthetically generated peptide
CCERCCNPACAPC

SEQ ID NO: 769 - protein, 13 aa, Artificial Sequence
  Synthetically generated peptide
CCESCCNPACAPC

SEQ ID NO: 770 - protein, 13 aa, Artificial Sequence
  Synthetically generated peptide
CCETCCNPACAPC

SEQ ID NO: 771 - protein, 13 aa, Artificial Sequence
  Synthetically generated peptide
CCEVCCNPACAPC

SEQ ID NO: 772 - protein, 13 aa, Artificial Sequence
  Synthetically generated peptide
CCEWCCNPACAPC

SEQ ID NO: 773 - protein, 13 aa, Artificial Sequence
  Synthetically generated peptide
CCEYCCNPACAPC

SEQ ID NO: 774 - protein, 13 aa, Artificial Sequence
  Synthetically generated peptide
CCELCCNPACFGC

SEQ ID NO: 775 - protein, 13 aa, Artificial Sequence
  Synthetically generated peptide
CCEACCNPACFGC

SEQ ID NO: 776 - protein, 13 aa, Artificial Sequence
  Synthetically generated peptide
CCECCCNPACFGC

SEQ ID NO: 777 - protein, 13 aa, Artificial Sequence
  Synthetically generated peptide
CCEDCCNPACFGC

SEQ ID NO: 778 - protein, 13 aa, Artificial Sequence
  Synthetically generated peptide
CCEECCNPACFGC

SEQ ID NO: 779 - protein, 13 aa, Artificial Sequence
  Synthetically generated peptide
CCEFCCNPACFGC

SEQ ID NO: 780 - protein, 13 aa, Artificial Sequence
  Synthetically generated peptide
CCEGCCNPACFGC

SEQ ID NO: 781 - protein, 13 aa, Artificial Sequence
  Synthetically generated peptide
CCEHCCNPACFGC

SEQ ID NO: 782 - protein, 13 aa, Artificial Sequence
  Synthetically generated peptide
CCEICCNPACFGC

SEQ ID NO: 783 - protein, 13 aa, Artificial Sequence
  Synthetically generated peptide
CCEKCCNPACFGC

SEQ ID NO: 784 - protein, 13 aa, Artificial Sequence
  Synthetically generated peptide
CCEMCCNPACFGC

SEQ ID NO: 785 - protein, 13 aa, Artificial Sequence
  Synthetically generated peptide
CCENCCNPACFGC

SEQ ID NO: 786 - protein, 13 aa, Artificial Sequence
  Synthetically generated peptide
CCEPCCNPACFGC

SEQ ID NO: 787 - protein, 13 aa, Artificial Sequence
  Synthetically generated peptide
CCEQCCNPACFGC

SEQ ID NO: 788 - protein, 13 aa, Artificial Sequence
  Synthetically generated peptide
CCERCCNPACFGC

SEQ ID NO: 789 - protein, 13 aa, Artificial Sequence
  Synthetically generated peptide
CCESCCNPACFGC

SEQ ID NO: 790 - protein, 13 aa, Artificial Sequence
  Synthetically generated peptide
CCETCCNPACFGC

SEQ ID NO: 791 - protein, 13 aa, Artificial Sequence
  Synthetically generated peptide
CCEVCCNPACFGC

SEQ ID NO: 792 - protein, 13 aa, Artificial Sequence
  Synthetically generated peptide
CCEWCCNPACFGC

SEQ ID NO: 793 - protein, 13 aa, Artificial Sequence
  Synthetically generated peptide
CCEYCCNPACFGC

SEQ ID NO: 794 - protein, 13 aa, Artificial Sequence
  Synthetically generated peptide
CCEVCCNPACAGC

SEQ ID NO: 795 - protein, 13 aa, Artificial Sequence
  Synthetically generated peptide
CCEACCNPACAGC

SEQ ID NO: 796 - protein, 13 aa, Artificial Sequence
  Synthetically generated peptide
CCECCCNPACAGC

SEQ ID NO: 797 - protein, 13 aa, Artificial Sequence
  Synthetically generated peptide
CCEDCCNPACAGC

SEQ ID NO: 798 - protein, 13 aa, Artificial Sequence
  Synthetically generated peptide
CCEECCNPACAGC

SEQ ID NO: 799 - protein, 13 aa, Artificial Sequence
  Synthetically generated peptide
CCEFCCNPACAGC

SEQ ID NO: 800 - protein, 13 aa, Artificial Sequence
  Synthetically generated peptide
CCEGCCNPACAGC

SEQ ID NO: 801 - protein, 13 aa, Artificial Sequence
  Synthetically generated peptide
CCEHCCNPACAGC

SEQ ID NO: 802 - protein, 13 aa, Artificial Sequence
  Synthetically generated peptide
CCEICCNPACAGC

SEQ ID NO: 803 - protein, 13 aa, Artificial Sequence
  Synthetically generated peptide
CCEKCCNPACAGC

SEQ ID NO: 804 - protein, 13 aa, Artificial Sequence
  Synthetically generated peptide
CCELCCNPACAGC

SEQ ID NO: 805 - protein, 14 aa, Artificial Sequence
  Synthetically generated peptide
CCEYCCNPACTGCY

SEQ ID NO: 806 - protein, 13 aa, Artificial Sequence
  Synthetically generated peptide
CCELCCNPACTGC

SEQ ID NO: 807 - protein, 13 aa, Artificial Sequence
  Synthetically generated peptide
CCEACCNPACTGC

SEQ ID NO: 808 - protein, 13 aa, Artificial Sequence
  Synthetically generated peptide
CCERCCNPACTGC

SEQ ID NO: 809 - protein, 13 aa, Artificial Sequence
  Synthetically generated peptide
CCENCCNPACTGC

SEQ ID NO: 810 - protein, 13 aa, Artificial Sequence
  Synthetically generated peptide
CCEDCCNPACTGC

SEQ ID NO: 811 - protein, 13 aa, Artificial Sequence
  Synthetically generated peptide
CCECCCNPACTGC

SEQ ID NO: 812 - protein, 13 aa, Artificial Sequence
  Synthetically generated peptide
CCEQCCNPACTGC

SEQ ID NO: 813 - protein, 13 aa, Artificial Sequence
  Synthetically generated peptide
CCEECCNPACTGC

SEQ ID NO: 814 - protein, 13 aa, Artificial Sequence
  Synthetically generated peptide
CCEGCCNPACTGC

SEQ ID NO: 815 - protein, 13 aa, Artificial Sequence
  Synthetically generated peptide
CCEHCCNPACTGC

SEQ ID NO: 816 - protein, 13 aa, Artificial Sequence
  Synthetically generated peptide
CCEICCNPACTGC

SEQ ID NO: 817 - protein, 13 aa, Artificial Sequence
  Synthetically generated peptide
CCEKCCNPACTGC

SEQ ID NO: 818 - protein, 13 aa, Artificial Sequence
  Synthetically generated peptide
CCEMCCNPACTGC

SEQ ID NO: 819 - protein, 13 aa, Artificial Sequence
  Synthetically generated peptide
CCEFCCNPACTGC

SEQ ID NO: 820 - protein, 13 aa, Artificial Sequence
  Synthetically generated peptide
CCEPCCNPACTGC

SEQ ID NO: 821 - protein, 13 aa, Artificial Sequence
  Synthetically generated peptide
CCESCCNPACTGC

SEQ ID NO: 822 - protein, 13 aa, Artificial Sequence
  Synthetically generated peptide
CCETCCNPACTGC

SEQ ID NO: 823 - protein, 13 aa, Artificial Sequence
  Synthetically generated peptide
CCEWCCNPACTGC

SEQ ID NO: 824 - protein, 13 aa, Artificial Sequence
  Synthetically generated peptide
CCEVCCNPACTGC

SEQ ID NO: 825 - protein, 13 aa, Artificial Sequence
  Synthetically generated peptide
CCEYCCNPACTGC

SEQ ID NO: 826 - protein, 13 aa, Artificial Sequence
  Synthetically generated peptide
CCELCCNPACTGC

SEQ ID NO: 827 - protein, 14 aa, Artificial Sequence
  Synthetically generated peptide
CCEACCNPACTGCY

SEQ ID NO: 828 - protein, 14 aa, Artificial Sequence
  Synthetically generated peptide
CCERCCNPACTGCY

SEQ ID NO: 829 - protein, 14 aa, Artificial Sequence
  Synthetically generated peptide
CCENCCNPACTGCY

SEQ ID NO: 830 - protein, 14 aa, Artificial Sequence
  Synthetically generated peptide
CCEDCCNPACTGCY

SEQ ID NO: 831 - protein, 14 aa, Artificial Sequence
  Synthetically generated peptide
CCECCCNPACTGCY

SEQ ID NO: 832 - protein, 14 aa, Artificial Sequence
  Synthetically generated peptide
CCEQCCNPACTGCY

SEQ ID NO: 833 - protein, 14 aa, Artificial Sequence
  Synthetically generated peptide
CCEECCNPACTGCY

SEQ ID NO: 834 - protein, 14 aa, Artificial Sequence
  Synthetically generated peptide
CCEGCCNPACTGCY

SEQ ID NO: 835 - protein, 14 aa, Artificial Sequence
  Synthetically generated peptide
CCEHCCNPACTGCY

SEQ ID NO: 836 - protein, 14 aa, Artificial Sequence
  Synthetically generated peptide
CCEICCNPACTGCY

SEQ ID NO: 837 - protein, 14 aa, Artificial Sequence
  Synthetically generated peptide
CCEKCCNPACTGCY

SEQ ID NO: 838 - protein, 14 aa, Artificial Sequence
  Synthetically generated peptide
CCEMCCNPACTGCY

SEQ ID NO: 839 - protein, 14 aa, Artificial Sequence
  Synthetically generated peptide
CCEFCCNPACTGCY

SEQ ID NO: 840 - protein, 14 aa, Artificial Sequence
  Synthetically generated peptide
CCEPCCNPACTGCY

SEQ ID NO: 841 - protein, 14 aa, Artificial Sequence
  Synthetically generated peptide
CCESCCNPACTGCY

SEQ ID NO: 842 - protein, 14 aa, Artificial Sequence
  Synthetically generated peptide
CCETCCNPACTGCY

SEQ ID NO: 843 - protein, 14 aa, Artificial Sequence
  Synthetically generated peptide
CCEWCCNPACTGCY

SEQ ID NO: 844 - protein, 14 aa, Artificial Sequence
  Synthetically generated peptide
CCEVCCNPACTGCY

SEQ ID NO: 845 - protein, 14 aa, Artificial Sequence
  Synthetically generated peptide
CCEYCCNPACTGCY

SEQ ID NO: 846 - protein, 14 aa, Artificial Sequence
  Synthetically generated peptide
CCELCCNPACTGCY

SEQ ID NO: 847 - protein, 13 aa, Artificial Sequence
  Synthetically generated peptide
CCEVCCNPACTGC

SEQ ID NO: 848 - protein, 15 aa, Artificial Sequence
  Synthetically generated peptide
NCCELCCNPACTGCY

SEQ ID NO: 849 - protein, 19 aa, Artificial Sequence
  Synthetically generated peptide
QSSNYCCEYCCNPACTGCY

SEQ ID NO: 850 - protein, 19 aa, Artificial Sequence
  Synthetically generated peptide
NTSNYCCEYCCNPACTGCY

SEQ ID NO: 851 - protein, 19 aa, Artificial Sequence
  Synthetically generated peptide
NLSNYCCEYCCNPACTGCY

SEQ ID NO: 852 - protein, 19 aa, Artificial Sequence
  Synthetically generated peptide
NISNYCCEYCCNPACTGCY

SEQ ID NO: 853 - protein, 19 aa, Artificial Sequence
  Synthetically generated peptide
NSSQYCCEYCCNPACTGCY

SEQ ID NO: 854 - protein, 18 aa, Artificial Sequence
  Synthetically generated peptide
SSNYCCEYCCNPACTGCY

SEQ ID NO: 855 - protein, 19 aa, Artificial Sequence
  Synthetically generated peptide
QSSQYCCEYCCNPACTGCY

SEQ ID NO: 856 - protein, 18 aa, Artificial Sequence
  Synthetically generated peptide
SSQYCCEYCCNPACTGCY

SEQ ID NO: 857 - protein, 19 aa, Artificial Sequence
  Synthetically generated peptide
NSSNYCCEACCNPACTGCY

SEQ ID NO: 858 - protein, 19 aa, Artificial Sequence
  Synthetically generated peptide
NSSNYCCERCCNPACTGCY

SEQ ID NO: 859 - protein, 19 aa, Artificial Sequence
  Synthetically generated peptide
NSSNYCCENCCNPACTGCY

SEQ ID NO: 860 - protein, 19 aa, Artificial Sequence
  Synthetically generated peptide
NSSNYCCEDCCNPACTGCY

SEQ ID NO: 861 - protein, 19 aa, Artificial Sequence
  Synthetically generated peptide
NSSNYCCECCCNPACTGCY

SEQ ID NO: 862 - protein, 19 aa, Artificial Sequence
  Synthetically generated peptide
NSSNYCCEQCCNPACTGCY

SEQ ID NO: 863 - protein, 19 aa, Artificial Sequence
  Synthetically generated peptide
NSSNYCCEECCNPACTGCY

SEQ ID NO: 864 - protein, 19 aa, Artificial Sequence
  Synthetically generated peptide
NSSNYCCEGCCNPACTGCY

SEQ ID NO: 865 - protein, 19 aa, Artificial Sequence
  Synthetically generated peptide
NSSNYCCEHCCNPACTGCY

SEQ ID NO: 866 - protein, 19 aa, Artificial Sequence
  Synthetically generated peptide
NSSNYCCEICCNPACTGCY

SEQ ID NO: 867 - protein, 19 aa, Artificial Sequence
  Synthetically generated peptide
NSSNYCCEKCCNPACTGCY

SEQ ID NO: 868 - protein, 19 aa, Artificial Sequence
  Synthetically generated peptide
NSSNYCCEMCCNPACTGCY

SEQ ID NO: 869 - protein, 19 aa, Artificial Sequence
  Synthetically generated peptide
NSSNYCCEFCCNPACTGCY

SEQ ID NO: 870 - protein, 19 aa, Artificial Sequence
  Synthetically generated peptide
NSSNYCCEPCCNPACTGCY

SEQ ID NO: 871 - protein, 19 aa, Artificial Sequence
  Synthetically generated peptide
NSSNYCCESCCNPACTGCY

SEQ ID NO: 872 - protein, 19 aa, Artificial Sequence
  Synthetically generated peptide
NSSNYCCETCCNPACTGCY

SEQ ID NO: 873 - protein, 19 aa, Artificial Sequence
  Synthetically generated peptide
NSSNYCCEWCCNPACTGCY

SEQ ID NO: 874 - protein, 19 aa, Artificial Sequence
  Synthetically generated peptide
NSSNYCCEVCCNPACTGCY

SEQ ID NO: 875 - protein, 14 aa, Artificial Sequence
  Synthetically generated peptide
CCEACCNPACTGCY

SEQ ID NO: 876 - protein, 14 aa, Artificial Sequence
  Synthetically generated peptide
CCERCCNPACTGCY

SEQ ID NO: 877 - protein, 14 aa, Artificial Sequence
  Synthetically generated peptide
CCENCCNPACTGCY

SEQ ID NO: 878 - protein, 14 aa, Artificial Sequence
  Synthetically generated peptide
CCEDCCNPACTGCY

SEQ ID NO: 879 - protein, 14 aa, Artificial Sequence
  Synthetically generated peptide
CCECCCNPACTGCY

SEQ ID NO: 880 - protein, 14 aa, Artificial Sequence
  Synthetically generated peptide
CCEQCCNPACTGCY

SEQ ID NO: 881 - protein, 14 aa, Artificial Sequence
  Synthetically generated peptide
CCEECCNPACTGCY

SEQ ID NO: 882 - protein, 14 aa, Artificial Sequence
  Synthetically generated peptide
CCEGCCNPACTGCY

SEQ ID NO: 883 - protein, 14 aa, Artificial Sequence
  Synthetically generated peptide
CCEHCCNPACTGCY

SEQ ID NO: 884 - protein, 14 aa, Artificial Sequence
  Synthetically generated peptide
CCEICCNPACTGCY

SEQ ID NO: 885 - protein, 14 aa, Artificial Sequence
  Synthetically generated peptide
CCEKCCNPACTGCY

SEQ ID NO: 886 - protein, 14 aa, Artificial Sequence
  Synthetically generated peptide
CCEMCCNPACTGCY

SEQ ID NO: 887 - protein, 14 aa, Artificial Sequence
  Synthetically generated peptide
CCEFCCNPACTGCY

SEQ ID NO: 888 - protein, 14 aa, Artificial Sequence
  Synthetically generated peptide
CCEPCCNPACTGCY

SEQ ID NO: 889 - protein, 14 aa, Artificial Sequence
  Synthetically generated peptide
CCESCCNPACTGCY

SEQ ID NO: 890 - protein, 14 aa, Artificial Sequence
  Synthetically generated peptide
CCETCCNPACTGCY

SEQ ID NO: 891 - protein, 14 aa, Artificial Sequence
  Synthetically generated peptide
CCEWCCNPACTGCY

SEQ ID NO: 892 - protein, 14 aa, Artificial Sequence
  Synthetically generated peptide
CCEVCCNPACTGCY

SEQ ID NO: 893 - protein, 13 aa, Artificial Sequence
  Synthetically generated peptide
CCEYCCNPACTGC

SEQ ID NO: 894 - protein, 13 aa, Artificial Sequence
  Synthetically generated peptide
CCEACCNPACTGC

SEQ ID NO: 895 - protein, 13 aa, Artificial Sequence
  Synthetically generated peptide
CCERCCNPACTGC

SEQ ID NO: 896 - protein, 13 aa, Artificial Sequence
  Synthetically generated peptide
CCENCCNPACTGC

SEQ ID NO: 897 - protein, 13 aa, Artificial Sequence
  Synthetically generated peptide
CCEDCCNPACTGC

SEQ ID NO: 898 - protein, 13 aa, Artificial Sequence
  Synthetically generated peptide
CCECCCNPACTGC

SEQ ID NO: 899 - protein, 13 aa, Artificial Sequence
  Synthetically generated peptide
CCEQCCNPACTGC

SEQ ID NO: 900 - protein, 13 aa, Artificial Sequence
  Synthetically generated peptide
CCEECCNPACTGC

SEQ ID NO: 901 - protein, 13 aa, Artificial Sequence
  Synthetically generated peptide
CCEGCCNPACTGC

SEQ ID NO: 902 - protein, 13 aa, Artificial Sequence
  Synthetically generated peptide
CCEHCCNPACTGC

SEQ ID NO: 903 - protein, 13 aa, Artificial Sequence
  Synthetically generated peptide
CCEICCNPACTGC

SEQ ID NO: 904 - protein, 13 aa, Artificial Sequence
  Synthetically generated peptide
CCEKCCNPACTGC

SEQ ID NO: 905 - protein, 13 aa, Artificial Sequence
  Synthetically generated peptide
CCEMCCNPACTGC

SEQ ID NO: 906 - protein, 13 aa, Artificial Sequence
  Synthetically generated peptide
CCEFCCNPACTGC

SEQ ID NO: 907 - protein, 13 aa, Artificial Sequence
  Synthetically generated peptide
CCEPCCNPACTGC

SEQ ID NO: 908 - protein, 13 aa, Artificial Sequence
  Synthetically generated peptide
CCESCCNPACTGC

SEQ ID NO: 909 - protein, 13 aa, Artificial Sequence
  Synthetically generated peptide
CCETCCNPACTGC

SEQ ID NO: 910 - protein, 13 aa, Artificial Sequence
  Synthetically generated peptide
CCEWCCNPACTGC

SEQ ID NO: 911 - protein, 14 aa, Artificial Sequence
  Synthetically generated peptide
CCELCCAPACTGCY

SEQ ID NO: 912 - protein, 14 aa, Artificial Sequence
  Synthetically generated peptide
CCELCCVPACTGCY

SEQ ID NO: 913 - protein, 14 aa, Artificial Sequence
  Synthetically generated peptide
CCELCCLPACTGCY

SEQ ID NO: 914 - protein, 14 aa, Artificial Sequence
  Synthetically generated peptide
CCELCCIPACTGCY

SEQ ID NO: 915 - protein, 14 aa, Artificial Sequence
  Synthetically generated peptide
CCELCCPPACTGCY

SEQ ID NO: 916 - protein, 14 aa, Artificial Sequence
  Synthetically generated peptide
CCELCCMPACTGCY

SEQ ID NO: 917 - protein, 14 aa, Artificial Sequence
  Synthetically generated peptide
CCELCCFPACTGCY

SEQ ID NO: 918 - protein, 14 aa, Artificial Sequence
  Synthetically generated peptide
CCELCCWPACTGCY

SEQ ID NO: 919 - protein, 14 aa, Artificial Sequence
  Synthetically generated peptide
CCELCCGPACTGCY

SEQ ID NO: 920 - protein, 14 aa, Artificial Sequence
  Synthetically generated peptide
CCELCCSPACTGCY

SEQ ID NO: 921 - protein, 14 aa, Artificial Sequence
  Synthetically generated peptide
CCELCCTPACTGCY

SEQ ID NO: 922 - protein, 14 aa, Artificial Sequence
  Synthetically generated peptide
CCELCCCPACTGCY

SEQ ID NO: 923 - protein, 14 aa, Artificial Sequence
  Synthetically generated peptide
CCELCCQPACTGCY

SEQ ID NO: 924 - protein, 14 aa, Artificial Sequence
  Synthetically generated peptide
CCELCCYPACTGCY

SEQ ID NO: 925 - protein, 14 aa, Artificial Sequence
  Synthetically generated peptide
CCELCCDPACTGCY

SEQ ID NO: 926 - protein, 14 aa, Artificial Sequence
  Synthetically generated peptide
CCELCCEPACTGCY

SEQ ID NO: 927 - protein, 14 aa, Artificial Sequence
  Synthetically generated peptide
CCELCCKPACTGCY

SEQ ID NO: 928 - protein, 14 aa, Artificial Sequence
  Synthetically generated peptide
CCELCCRPACTGCY

SEQ ID NO: 929 - protein, 14 aa, Artificial Sequence
  Synthetically generated peptide
CCELCCHPACTGCY

SEQ ID NO: 930 - protein, 14 aa, Artificial Sequence
  Synthetically generated peptide
CCEYCCAPACTGCY

SEQ ID NO: 931 - protein, 14 aa, Artificial Sequence
  Synthetically generated peptide
CCEYCCVPACTGCY

SEQ ID NO: 932 - protein, 14 aa, Artificial Sequence
  Synthetically generated peptide
CCEYCCLPACTGCY

SEQ ID NO: 933 - protein, 14 aa, Artificial Sequence
  Synthetically generated peptide
CCEYCCIPACTGCY

SEQ ID NO: 934 - protein, 14 aa, Artificial Sequence
  Synthetically generated peptide
CCEYCCPPACTGCY

SEQ ID NO: 935 - protein, 14 aa, Artificial Sequence
  Synthetically generated peptide
CCEYCCMPACTGCY

SEQ ID NO: 936 - protein, 14 aa, Artificial Sequence
  Synthetically generated peptide
CCEYCCFPACTGCY

SEQ ID NO: 937 - protein, 14 aa, Artificial Sequence
  Synthetically generated peptide
CCEYCCWPACTGCY

SEQ ID NO: 938 - protein, 14 aa, Artificial Sequence
  Synthetically generated peptide
CCEYCCGPACTGCY

SEQ ID NO: 939 - protein, 14 aa, Artificial Sequence
  Synthetically generated peptide
CCEYCCSPACTGCY

SEQ ID NO: 940 - protein, 14 aa, Artificial Sequence
  Synthetically generated peptide
CCEYCCTPACTGCY

SEQ ID NO: 941 - protein, 14 aa, Artificial Sequence
  Synthetically generated peptide
CCEYCCCPACTGCY

SEQ ID NO: 942 - protein, 14 aa, Artificial Sequence
  Synthetically generated peptide
CCEYCCQPACTGCY

SEQ ID NO: 943 - protein, 14 aa, Artificial Sequence
  Synthetically generated peptide
CCEYCCYPACTGCY

SEQ ID NO: 944 - protein, 14 aa, Artificial Sequence
  Synthetically generated peptide
CCEYCCDPACTGCY

SEQ ID NO: 945 - protein, 14 aa, Artificial Sequence
  Synthetically generated peptide
CCEYCCEPACTGCY

SEQ ID NO: 946 - protein, 14 aa, Artificial Sequence
  Synthetically generated peptide
CCEYCCKPACTGCY

SEQ ID NO: 947 - protein, 14 aa, Artificial Sequence
  Synthetically generated peptide
CCEYCCRPACTGCY

SEQ ID NO: 948 - protein, 14 aa, Artificial Sequence
  Synthetically generated peptide
CCEYCCHPACTGCY

SEQ ID NO: 949 - protein, 13 aa, Artificial Sequence
  Synthetically generated peptide
CCELCCAPACTGC

SEQ ID NO: 950 - protein, 13 aa, Artificial Sequence
  Synthetically generated peptide
CCELCCVPACTGC

SEQ ID NO: 951 - protein, 13 aa, Artificial Sequence
  Synthetically generated peptide
CCELCCLPACTGC

SEQ ID NO: 952 - protein, 13 aa, Artificial Sequence
  Synthetically generated peptide
CCELCCIPACTGC

SEQ ID NO: 953 - protein, 13 aa, Artificial Sequence
  Synthetically generated peptide
CCELCCPPACTGC

SEQ ID NO: 954 - protein, 13 aa, Artificial Sequence
  Synthetically generated peptide
CCELCCMPACTGC

SEQ ID NO: 955 - protein, 13 aa, Artificial Sequence
  Synthetically generated peptide
CCELCCFPACTGC

SEQ ID NO: 956 - protein, 13 aa, Artificial Sequence
  Synthetically generated peptide
CCELCCWPACTGC

SEQ ID NO: 957 - protein, 13 aa, Artificial Sequence
  Synthetically generated peptide
CCELCCGPACTGC

SEQ ID NO: 958 - protein, 13 aa, Artificial Sequence
  Synthetically generated peptide
CCELCCSPACTGC

SEQ ID NO: 959 - protein, 13 aa, Artificial Sequence
  Synthetically generated peptide
CCELCCTPACTGC

SEQ ID NO: 960 - protein, 13 aa, Artificial Sequence
  Synthetically generated peptide
CCELCCCPACTGC

SEQ ID NO: 961 - protein, 13 aa, Artificial Sequence
  Synthetically generated peptide
CCELCCQPACTGC

SEQ ID NO: 962 - protein, 13 aa, Artificial Sequence
  Synthetically generated peptide
CCELCCYPACTGC

SEQ ID NO: 963 - protein, 13 aa, Artificial Sequence
  Synthetically generated peptide
CCELCCDPACTGC

SEQ ID NO: 964 - protein, 13 aa, Artificial Sequence
  Synthetically generated peptide
CCELCCEPACTGC

SEQ ID NO: 965 - protein, 13 aa, Artificial Sequence
  Synthetically generated peptide
CCELCCKPACTGC

SEQ ID NO: 966 - protein, 13 aa, Artificial Sequence
  Synthetically generated peptide
CCELCCRPACTGC

SEQ ID NO: 967 - protein, 13 aa, Artificial Sequence
  Synthetically generated peptide
CCELCCHPACTGC

SEQ ID NO: 968 - protein, 13 aa, Artificial Sequence
  Synthetically generated peptide
CCEYCCAPACTGC

SEQ ID NO: 969 - protein, 13 aa, Artificial Sequence
  Synthetically generated peptide
CCEYCCVPACTGC

SEQ ID NO: 970 - protein, 13 aa, Artificial Sequence
  Synthetically generated peptide
CCEYCCLPACTGC

SEQ ID NO: 971 - protein, 13 aa, Artificial Sequence
  Synthetically generated peptide
CCEYCCIPACTGC

SEQ ID NO: 972 - protein, 13 aa, Artificial Sequence
  Synthetically generated peptide
CCEYCCPPACTGC

SEQ ID NO: 973 - protein, 13 aa, Artificial Sequence
  Synthetically generated peptide
CCEYCCMPACTGC

SEQ ID NO: 974 - protein, 13 aa, Artificial Sequence
  Synthetically generated peptide
CCEYCCFPACTGC

SEQ ID NO: 975 - protein, 13 aa, Artificial Sequence
  Synthetically generated peptide
CCEYCCWPACTGC

SEQ ID NO: 976 - protein, 13 aa, Artificial Sequence
  Synthetically generated peptide
CCEYCCGPACTGC

SEQ ID NO: 977 - protein, 13 aa, Artificial Sequence
  Synthetically generated peptide
CCEYCCSPACTGC

SEQ ID NO: 978 - protein, 13 aa, Artificial Sequence
  Synthetically generated peptide
CCEYCCTPACTGC

SEQ ID NO: 979 - protein, 13 aa, Artificial Sequence
  Synthetically generated peptide
CCEYCCCPACTGC

SEQ ID NO: 980 - protein, 13 aa, Artificial Sequence
  Synthetically generated peptide
CCEYCCQPACTGC

SEQ ID NO: 981 - protein, 13 aa, Artificial Sequence
  Synthetically generated peptide
CCEYCCYPACTGC

SEQ ID NO: 982 - protein, 13 aa, Artificial Sequence
  Synthetically generated peptide
CCEYCCDPACTGC

SEQ ID NO: 983 - protein, 13 aa, Artificial Sequence
  Synthetically generated peptide
CCEYCCEPACTGC

SEQ ID NO: 984 - protein, 13 aa, Artificial Sequence
  Synthetically generated peptide
CCEYCCKPACTGC

SEQ ID NO: 985 - protein, 13 aa, Artificial Sequence
  Synthetically generated peptide
CCEYCCRPACTGC

SEQ ID NO: 986 - protein, 13 aa, Artificial Sequence
  Synthetically generated peptide
CCEYCCHPACTGC

SEQ ID NO: 987 - protein, 14 aa, Artificial Sequence
  Synthetically generated peptide
CCELCCNPTCTGCY

SEQ ID NO: 988 - protein, 14 aa, Artificial Sequence
  Synthetically generated peptide
CCEYCCNPTCTGCY

SEQ ID NO: 989 - protein, 13 aa, Artificial Sequence
  Synthetically generated peptide
CCELCCNPTCTGC

SEQ ID NO: 990 - protein, 13 aa, Artificial Sequence
  Synthetically generated peptide
CCEYCCNPTCTGC

SEQ ID NO: 991 - protein, 14 aa, Artificial Sequence
  Synthetically generated peptide
CCEFCCNPTCTGCY

SEQ ID NO: 992 - protein, 13 aa, Artificial Sequence
  Synthetically generated peptide
CCEFCCNPTCTGC

SEQ ID NO: 993 - protein, 14 aa, Artificial Sequence
  Synthetically generated peptide
CCEWCCNPTCTGCY

SEQ ID NO: 994 - protein, 13 aa, Artificial Sequence
  Synthetically generated peptide
CCEWCCNPTCTGC

SEQ ID NO: 995 - protein, 14 aa, Artificial Sequence
  Synthetically generated peptide
CCELCCNGACTGCY

SEQ ID NO: 996 - protein, 14 aa, Artificial Sequence
  Synthetically generated peptide
CCEYCCNGACTGCY

SEQ ID NO: 997 - protein, 13 aa, Artificial Sequence
  Synthetically generated peptide
CCELCCNGACTGC

SEQ ID NO: 998 - protein, 13 aa, Artificial Sequence
  Synthetically generated peptide
CCEYCCNGACTGC

SEQ ID NO: 999 - protein, 14 aa, Artificial Sequence
  Synthetically generated peptide
CCEFCCNGACTGCY

SEQ ID NO: 1000 - protein, 13 aa, Artificial Sequence
  Synthetically generated peptide
CCEFCCNGACTGC

SEQ ID NO: 1001 - protein, 14 aa, Artificial Sequence
  Synthetically generated peptide
CCEWCCNGACTGCY

SEQ ID NO: 1002 - protein, 13 aa, Artificial Sequence
  Synthetically generated peptide
CCEWCCNGACTGC

SEQ ID NO: 1003 - protein, 14 aa, Artificial Sequence
  Synthetically generated peptide
CCELCCNPACVGCY

SEQ ID NO: 1004 - protein, 14 aa, Artificial Sequence
  Synthetically generated peptide
CCEYCCNPACVGCY

SEQ ID NO: 1005 - protein, 13 aa, Artificial Sequence
  Synthetically generated peptide
CCELCCNPACVGC

SEQ ID NO: 1006 - protein, 13 aa, Artificial Sequence
  Synthetically generated peptide
CCEYCCNPACVGC

SEQ ID NO: 1007 - protein, 14 aa, Artificial Sequence
  Synthetically generated peptide
CCEFCCNPACVGCY

SEQ ID NO: 1008 - protein, 13 aa, Artificial Sequence
  Synthetically generated peptide
CCEFCCNPACVGC

SEQ ID NO: 1009 - protein, 14 aa, Artificial Sequence
  Synthetically generated peptide
CCEWCCNPACVGCY

SEQ ID NO: 1010 - protein, 13 aa, Artificial Sequence
  Synthetically generated peptide
CCEWCCNPACVGC

SEQ ID NO: 1011 - protein, 14 aa, Artificial Sequence
  Synthetically generated peptide
CCELCCNPACGGCY

SEQ ID NO: 1012 - protein, 14 aa, Artificial Sequence
  Synthetically generated peptide
CCEYCCNPACGGCY

SEQ ID NO: 1013 - protein, 13 aa, Artificial Sequence
  Synthetically generated peptide
CCELCCNPACGGC

SEQ ID NO: 1014 - protein, 13 aa, Artificial Sequence
  Synthetically generated peptide
CCEYCCNPACGGC

SEQ ID NO: 1015 - protein, 14 aa, Artificial Sequence
  Synthetically generated peptide
CCEFCCNPACGGCY

SEQ ID NO: 1016 - protein, 13 aa, Artificial Sequence
  Synthetically generated peptide
CCEFCCNPACGGC

SEQ ID NO: 1017 - protein, 14 aa, Artificial Sequence
  Synthetically generated peptide
CCEWCCNPACGGCY

SEQ ID NO: 1018 - protein, 13 aa, Artificial Sequence
  Synthetically generated peptide
CCEWCCNPACGGC

SEQ ID NO: 1019 - protein, 14 aa, Artificial Sequence
  Synthetically generated peptide
CCELCCNPACTACY

SEQ ID NO: 1020 - protein, 14 aa, Artificial Sequence
  Synthetically generated peptide
CCEYCCNPACTACY

SEQ ID NO: 1021 - protein, 13 aa, Artificial Sequence
  Synthetically generated peptide
CCELCCNPACTAC

SEQ ID NO: 1022 - protein, 13 aa, Artificial Sequence
  Synthetically generated peptide
CCEYCCNPACTAC

SEQ ID NO: 1023 - protein, 14 aa, Artificial Sequence
  Synthetically generated peptide
CCEWCCNPACTACY

SEQ ID NO: 1024 - protein, 13 aa, Artificial Sequence
  Synthetically generated peptide
CCEWCCNPACTAC

SEQ ID NO: 1025 - protein, 14 aa, Artificial Sequence
  Synthetically generated peptide
CCEFCCNPACTACY

SEQ ID NO: 1026 - protein, 13 aa, Artificial Sequence
  Synthetically generated peptide
CCEFCCNPACTAC

SEQ ID NO: 1027 - protein, 14 aa, Artificial Sequence
  Synthetically generated peptide
CCELCCNPACTGCA

SEQ ID NO: 1028 - protein, 14 aa, Artificial Sequence
  Synthetically generated peptide
CCELCCNPACTGCV

SEQ ID NO: 1029 - protein, 14 aa, Artificial Sequence
  Synthetically generated peptide
CCELCCNPACTGCL

SEQ ID NO: 1030 - protein, 14 aa, Artificial Sequence
  Synthetically generated peptide
CCELCCNPACTGCI

SEQ ID NO: 1031 - protein, 14 aa, Artificial Sequence
  Synthetically generated peptide
CCELCCNPACTGCP

SEQ ID NO: 1032 - protein, 14 aa, Artificial Sequence
  Synthetically generated peptide
CCELCCNPACTGCM

SEQ ID NO: 1033 - protein, 14 aa, Artificial Sequence
  Synthetically generated peptide
CCELCCNPACTGCF

SEQ ID NO: 1034 - protein, 14 aa, Artificial Sequence
  Synthetically generated peptide
CCELCCNPACTGCW

SEQ ID NO: 1035 - protein, 14 aa, Artificial Sequence
  Synthetically generated peptide
CCELCCNPACTGCG

SEQ ID NO: 1036 - protein, 14 aa, Artificial Sequence
  Synthetically generated peptide
CCELCCNPACTGCS

SEQ ID NO: 1037 - protein, 14 aa, Artificial Sequence
  Synthetically generated peptide
CCELCCNPACTGCT

SEQ ID NO: 1038 - protein, 14 aa, Artificial Sequence
  Synthetically generated peptide
CCELCCNPACTGCC

SEQ ID NO: 1039 - protein, 14 aa, Artificial Sequence
  Synthetically generated peptide
CCELCCNPACTGCN

SEQ ID NO: 1040 - protein, 14 aa, Artificial Sequence
  Synthetically generated peptide
CCELCCNPACTGCQ

SEQ ID NO: 1041 - protein, 14 aa, Artificial Sequence
  Synthetically generated peptide
CCELCCNPACTGCD

SEQ ID NO: 1042 - protein, 14 aa, Artificial Sequence
  Synthetically generated peptide
CCELCCNPACTGCE

SEQ ID NO: 1043 - protein, 14 aa, Artificial Sequence
  Synthetically generated peptide
CCELCCNPACTGCK

SEQ ID NO: 1044 - protein, 14 aa, Artificial Sequence
  Synthetically generated peptide
CCELCCNPACTGCR

SEQ ID NO: 1045 - protein, 14 aa, Artificial Sequence
  Synthetically generated peptide
CCELCCNPACTGCH

SEQ ID NO: 1046 - protein, 14 aa, Artificial Sequence
  Synthetically generated peptide
CCEYCCNPACTGCA

SEQ ID NO: 1047 - protein, 14 aa, Artificial Sequence
  Synthetically generated peptide
CCEYCCNPACTGCV

SEQ ID NO: 1048 - protein, 14 aa, Artificial Sequence
  Synthetically generated peptide
CCEYCCNPACTGCL

SEQ ID NO: 1049 - protein, 14 aa, Artificial Sequence
  Synthetically generated peptide
CCEYCCNPACTGCI

SEQ ID NO: 1050 - protein, 14 aa, Artificial Sequence
  Synthetically generated peptide
CCEYCCNPACTGCP

SEQ ID NO: 1051 - protein, 14 aa, Artificial Sequence
  Synthetically generated peptide
CCEYCCNPACTGCM

SEQ ID NO: 1052 - protein, 14 aa, Artificial Sequence
  Synthetically generated peptide
CCEYCCNPACTGCF

SEQ ID NO: 1053 - protein, 14 aa, Artificial Sequence
  Synthetically generated peptide
CCEYCCNPACTGCW

SEQ ID NO: 1054 - protein, 14 aa, Artificial Sequence
  Synthetically generated peptide
CCEYCCNPACTGCG

SEQ ID NO: 1055 - protein, 14 aa, Artificial Sequence
  Synthetically generated peptide
CCEYCCNPACTGCS

SEQ ID NO: 1056 - protein, 14 aa, Artificial Sequence
  Synthetically generated peptide
CCEYCCNPACTGCT

SEQ ID NO: 1057 - protein, 14 aa, Artificial Sequence
  Synthetically generated peptide
CCEYCCNPACTGCC

SEQ ID NO: 1058 - protein, 14 aa, Artificial Sequence
  Synthetically generated peptide
CCEYCCNPACTGCN

SEQ ID NO: 1059 - protein, 14 aa, Artificial Sequence
  Synthetically generated peptide
CCEYCCNPACTGCQ

SEQ ID NO: 1060 - protein, 14 aa, Artificial Sequence
  Synthetically generated peptide
CCEYCCNPACTGCD

SEQ ID NO: 1061 - protein, 14 aa, Artificial Sequence
  Synthetically generated peptide
CCEYCCNPACTGCE

SEQ ID NO: 1062 - protein, 14 aa, Artificial Sequence
  Synthetically generated peptide
CCEYCCNPACTGCK

SEQ ID NO: 1063 - protein, 14 aa, Artificial Sequence
  Synthetically generated peptide
CCEYCCNPACTGCR

SEQ ID NO: 1064 - protein, 14 aa, Artificial Sequence
  Synthetically generated peptide
CCEYCCNPACTGCH

SEQ ID NO: 1065 - protein, 14 aa, Artificial Sequence
  Synthetically generated peptide
CCALCCNPACTGCY

SEQ ID NO: 1066 - protein, 14 aa, Artificial Sequence
  Synthetically generated peptide
CCVLCCNPACTGCY

SEQ ID NO: 1067 - protein, 14 aa, Artificial Sequence
  Synthetically generated peptide
CCLLCCNPACTGCY

SEQ ID NO: 1068 - protein, 14 aa, Artificial Sequence
  Synthetically generated peptide
CCILCCNPACTGCY

SEQ ID NO: 1069 - protein, 14 aa, Artificial Sequence
  Synthetically generated peptide
CCMLCCNPACTGCY

SEQ ID NO: 1070 - protein, 14 aa, Artificial Sequence
  Synthetically generated peptide
CCFLCCNPACTGCY

SEQ ID NO: 1071 - protein, 14 aa, Artificial Sequence
  Synthetically generated peptide
CCWLCCNPACTGCY

SEQ ID NO: 1072 - protein, 14 aa, Artificial Sequence
  Synthetically generated peptide
CCGLCCNPACTGCY

SEQ ID NO: 1073 - protein, 14 aa, Artificial Sequence
  Synthetically generated peptide
CCSLCCNPACTGCY

SEQ ID NO: 1074 - protein, 14 aa, Artificial Sequence
  Synthetically generated peptide
CCTLCCNPACTGCY

SEQ ID NO: 1075 - protein, 14 aa, Artificial Sequence
  Synthetically generated peptide
CCCLCCNPACTGCY

SEQ ID NO: 1076 - protein, 14 aa, Artificial Sequence
  Synthetically generated peptide
CCNLCCNPACTGCY

SEQ ID NO: 1077 - protein, 14 aa, Artificial Sequence
  Synthetically generated peptide
CCQLCCNPACTGCY

SEQ ID NO: 1078 - protein, 14 aa, Artificial Sequence
  Synthetically generated peptide
CCYLCCNPACTGCY

SEQ ID NO: 1079 - protein, 14 aa, Artificial Sequence
  Synthetically generated peptide
CCDLCCNPACTGCY

SEQ ID NO: 1080 - protein, 14 aa, Artificial Sequence
  Synthetically generated peptide
CCKLCCNPACTGCY

SEQ ID NO: 1081 - protein, 14 aa, Artificial Sequence
  Synthetically generated peptide
CCRLCCNPACTGCY

SEQ ID NO: 1082 - protein, 14 aa, Artificial Sequence
  Synthetically generated peptide
CCHLCCNPACTGCY

SEQ ID NO: 1083 - protein, 13 aa, Artificial Sequence
  Synthetically generated peptide
CCALCCNPACTGC

SEQ ID NO: 1084 - protein, 13 aa, Artificial Sequence
  Synthetically generated peptide
CCVLCCNPACTGC

SEQ ID NO: 1085 - protein, 13 aa, Artificial Sequence
  Synthetically generated peptide
CCLLCCNPACTGC

SEQ ID NO: 1086 - protein, 13 aa, Artificial Sequence
  Synthetically generated peptide
CCILCCNPACTGC

SEQ ID NO: 1087 - protein, 13 aa, Artificial Sequence
  Synthetically generated peptide
CCMLCCNPACTGC

SEQ ID NO: 1088 - protein, 13 aa, Artificial Sequence
  Synthetically generated peptide
CCFLCCNPACTGC

SEQ ID NO: 1089 - protein, 13 aa, Artificial Sequence
  Synthetically generated peptide
CCWLCCNPACTGC

SEQ ID NO: 1090 - protein, 13 aa, Artificial Sequence
  Synthetically generated peptide
CCGLCCNPACTGC

SEQ ID NO: 1091 - protein, 13 aa, Artificial Sequence
  Synthetically generated peptide
CCSLCCNPACTGC

SEQ ID NO: 1092 - protein, 13 aa, Artificial Sequence
  Synthetically generated peptide
CCTLCCNPACTGC

SEQ ID NO: 1093 - protein, 13 aa, Artificial Sequence
  Synthetically generated peptide
CCCLCCNPACTGC

SEQ ID NO: 1094 - protein, 13 aa, Artificial Sequence
  Synthetically generated peptide
CCNLCCNPACTGC

SEQ ID NO: 1095 - protein, 13 aa, Artificial Sequence
  Synthetically generated peptide
CCQLCCNPACTGC

SEQ ID NO: 1096 - protein, 13 aa, Artificial Sequence
  Synthetically generated peptide
CCYLCCNPACTGC

SEQ ID NO: 1097 - protein, 13 aa, Artificial Sequence
  Synthetically generated peptide
CCDLCCNPACTGC

SEQ ID NO: 1098 - protein, 13 aa, Artificial Sequence
  Synthetically generated peptide
CCKLCCNPACTGC

SEQ ID NO: 1099 - protein, 13 aa, Artificial Sequence
  Synthetically generated peptide
CCRLCCNPACTGC

SEQ ID NO: 1100 - protein, 13 aa, Artificial Sequence
  Synthetically generated peptide
CCHLCCNPACTGC

SEQ ID NO: 1101 - protein, 14 aa, Artificial Sequence
  Synthetically generated peptide
CCAYCCNPACTGCY

SEQ ID NO: 1102 - protein, 14 aa, Artificial Sequence
  Synthetically generated peptide
CCVYCCNPACTGCY

SEQ ID NO: 1103 - protein, 14 aa, Artificial Sequence
  Synthetically generated peptide
CCLYCCNPACTGCY

SEQ ID NO: 1104 - protein, 14 aa, Artificial Sequence
  Synthetically generated peptide
CCIYCCNPACTGCY

SEQ ID NO: 1105 - protein, 14 aa, Artificial Sequence
  Synthetically generated peptide
CCMYCCNPACTGCY

SEQ ID NO: 1106 - protein, 14 aa, Artificial Sequence
  Synthetically generated peptide
CCFYCCNPACTGCY

SEQ ID NO: 1107 - protein, 14 aa, Artificial Sequence
  Synthetically generated peptide
CCWYCCNPACTGCY

SEQ ID NO: 1108 - protein, 14 aa, Artificial Sequence
  Synthetically generated peptide
CCGYCCNPACTGCY

SEQ ID NO: 1109 - protein, 14 aa, Artificial Sequence
  Synthetically generated peptide
CCSYCCNPACTGCY

SEQ ID NO: 1110 - protein, 14 aa, Artificial Sequence
  Synthetically generated peptide
CCTYCCNPACTGCY

SEQ ID NO: 1111 - protein, 14 aa, Artificial Sequence
  Synthetically generated peptide
CCCYCCNPACTGCY

SEQ ID NO: 1112 - protein, 14 aa, Artificial Sequence
  Synthetically generated peptide
CCNYCCNPACTGCY

SEQ ID NO: 1113 - protein, 14 aa, Artificial Sequence
  Synthetically generated peptide
CCQYCCNPACTGCY

SEQ ID NO: 1114 - protein, 14 aa, Artificial Sequence
  Synthetically generated peptide
CCYYCCNPACTGCY

SEQ ID NO: 1115 - protein, 14 aa, Artificial Sequence
  Synthetically generated peptide
CCDYCCNPACTGCY

SEQ ID NO: 1116 - protein, 14 aa, Artificial Sequence
  Synthetically generated peptide
CCKYCCNPACTGCY

SEQ ID NO: 1117 - protein, 14 aa, Artificial Sequence
  Synthetically generated peptide
CCRYCCNPACTGCY

SEQ ID NO: 1118 - protein, 14 aa, Artificial Sequence
  Synthetically generated peptide
CCHYCCNPACTGCY

SEQ ID NO: 1119 - protein, 13 aa, Artificial Sequence
  Synthetically generated peptide
CCAYCCNPACTGC

SEQ ID NO: 1120 - protein, 13 aa, Artificial Sequence
  Synthetically generated peptide
CCVYCCNPACTGC

SEQ ID NO: 1121 - protein, 13 aa, Artificial Sequence
  Synthetically generated peptide
CCLYCCNPACTGC

SEQ ID NO: 1122 - protein, 13 aa, Artificial Sequence
  Synthetically generated peptide
CCIYCCNPACTGC

SEQ ID NO: 1123 - protein, 13 aa, Artificial Sequence
  Synthetically generated peptide
CCMYCCNPACTGC

SEQ ID NO: 1124 - protein, 13 aa, Artificial Sequence
  Synthetically generated peptide
CCFYCCNPACTGC

SEQ ID NO: 1125 - protein, 13 aa, Artificial Sequence
  Synthetically generated peptide
CCWYCCNPACTGC

SEQ ID NO: 1126 - protein, 13 aa, Artificial Sequence
  Synthetically generated peptide
CCGYCCNPACTGC

SEQ ID NO: 1127 - protein, 13 aa, Artificial Sequence
  Synthetically generated peptide
CCSYCCNPACTGC

SEQ ID NO: 1128 - protein, 13 aa, Artificial Sequence
  Synthetically generated peptide
CCTYCCNPACTGC

SEQ ID NO: 1129 - protein, 13 aa, Artificial Sequence
  Synthetically generated peptide
CCCYCCNPACTGC

SEQ ID NO: 1130 - protein, 13 aa, Artificial Sequence
  Synthetically generated peptide
CCNYCCNPACTGC

SEQ ID NO: 1131 - protein, 13 aa, Artificial Sequence
  Synthetically generated peptide
CCQYCCNPACTGC

SEQ ID NO: 1132 - protein, 13 aa, Artificial Sequence
  Synthetically generated peptide
CCYYCCNPACTGC

SEQ ID NO: 1133 - protein, 13 aa, Artificial Sequence
  Synthetically generated peptide
CCDYCCNPACTGC

SEQ ID NO: 1134 - protein, 13 aa, Artificial Sequence
  Synthetically generated peptide
CCKYCCNPACTGC

SEQ ID NO: 1135 - protein, 13 aa, Artificial Sequence
  Synthetically generated peptide
CCRYCCNPACTGC

SEQ ID NO: 1136 - protein, 13 aa, Artificial Sequence
  Synthetically generated peptide
CCHYCCNPACTGC

SEQ ID NO: 1137 - protein, 14 aa, Artificial Sequence
  Synthetically generated peptide
CCEFCCAPACTGCY

SEQ ID NO: 1138 - protein, 14 aa, Artificial Sequence
  Synthetically generated peptide
CCEFCCVPACTGCY

SEQ ID NO: 1139 - protein, 14 aa, Artificial Sequence
  Synthetically generated peptide
CCEFCCLPACTGCY

SEQ ID NO: 1140 - protein, 14 aa, Artificial Sequence
  Synthetically generated peptide
CCEFCCIPACTGCY

SEQ ID NO: 1141 - protein, 14 aa, Artificial Sequence
  Synthetically generated peptide
CCEFCCPPACTGCY

SEQ ID NO: 1142 - protein, 14 aa, Artificial Sequence
  Synthetically generated peptide
CCEFCCMPACTGCY

SEQ ID NO: 1143 - protein, 14 aa, Artificial Sequence
  Synthetically generated peptide
CCEFCCFPACTGCY

SEQ ID NO: 1144 - protein, 14 aa, Artificial Sequence
  Synthetically generated peptide
CCEFCCWPACTGCY

SEQ ID NO: 1145 - protein, 14 aa, Artificial Sequence
  Synthetically generated peptide
CCEFCCGPACTGCY

SEQ ID NO: 1146 - protein, 14 aa, Artificial Sequence
  Synthetically generated peptide
CCEFCCSPACTGCY

SEQ ID NO: 1147 - protein, 14 aa, Artificial Sequence
  Synthetically generated peptide
CCEFCCTPACTGCY

SEQ ID NO: 1148 - protein, 14 aa, Artificial Sequence
  Synthetically generated peptide
CCEFCCCPACTGCY

SEQ ID NO: 1149 - protein, 14 aa, Artificial Sequence
  Synthetically generated peptide
CCEFCCQPACTGCY

SEQ ID NO: 1150 - protein, 14 aa, Artificial Sequence
  Synthetically generated peptide
CCEFCCYPACTGCY

SEQ ID NO: 1151 - protein, 14 aa, Artificial Sequence
  Synthetically generated peptide
CCEFCCDPACTGCY

SEQ ID NO: 1152 - protein, 14 aa, Artificial Sequence
  Synthetically generated peptide
CCEFCCEPACTGCY

SEQ ID NO: 1153 - protein, 14 aa, Artificial Sequence
  Synthetically generated peptide
CCEFCCKPACTGCY

SEQ ID NO: 1154 - protein, 14 aa, Artificial Sequence
  Synthetically generated peptide
CCEFCCRPACTGCY

SEQ ID NO: 1155 - protein, 14 aa, Artificial Sequence
  Synthetically generated peptide
CCEFCCHPACTGCY

SEQ ID NO: 1156 - protein, 13 aa, Artificial Sequence
  Synthetically generated peptide
CCEFCCAPACTGC

SEQ ID NO: 1157 - protein, 13 aa, Artificial Sequence
  Synthetically generated peptide
CCEFCCVPACTGC

SEQ ID NO: 1158 - protein, 13 aa, Artificial Sequence
  Synthetically generated peptide
CCEFCCLPACTGC

SEQ ID NO: 1159 - protein, 13 aa, Artificial Sequence
  Synthetically generated peptide
CCEFCCIPACTGC

SEQ ID NO: 1160 - protein, 13 aa, Artificial Sequence
  Synthetically generated peptide
CCEFCCPPACTGC

SEQ ID NO: 1161 - protein, 13 aa, Artificial Sequence
  Synthetically generated peptide
CCEFCCMPACTGC

SEQ ID NO: 1162 - protein, 13 aa, Artificial Sequence
  Synthetically generated peptide
CCEFCCFPACTGC

SEQ ID NO: 1163 - protein, 13 aa, Artificial Sequence
  Synthetically generated peptide
CCEFCCWPACTGC

SEQ ID NO: 1164 - protein, 13 aa, Artificial Sequence
  Synthetically generated peptide
CCEFCCGPACTGC

SEQ ID NO: 1165 - protein, 13 aa, Artificial Sequence
  Synthetically generated peptide
CCEFCCSPACTGC

SEQ ID NO: 1166 - protein, 13 aa, Artificial Sequence
  Synthetically generated peptide
CCEFCCTPACTGC

SEQ ID NO: 1167 - protein, 13 aa, Artificial Sequence
  Synthetically generated peptide
CCEFCCCPACTGC

SEQ ID NO: 1168 - protein, 13 aa, Artificial Sequence
  Synthetically generated peptide
CCEFCCQPACTGC

SEQ ID NO: 1169 - protein, 13 aa, Artificial Sequence
  Synthetically generated peptide
CCEFCCYPACTGC

SEQ ID NO: 1170 - protein, 13 aa, Artificial Sequence
  Synthetically generated peptide
CCEFCCDPACTGC

SEQ ID NO: 1171 - protein, 13 aa, Artificial Sequence
  Synthetically generated peptide
CCEFCCEPACTGC

SEQ ID NO: 1172 - protein, 13 aa, Artificial Sequence
  Synthetically generated peptide
CCEFCCKPACTGC

SEQ ID NO: 1173 - protein, 13 aa, Artificial Sequence
  Synthetically generated peptide
CCEFCCRPACTGC

SEQ ID NO: 1174 - protein, 13 aa, Artificial Sequence
  Synthetically generated peptide
CCEFCCHPACTGC

SEQ ID NO: 1175 - protein, 14 aa, Artificial Sequence
  Synthetically generated peptide
CCEWCCAPACTGCY

SEQ ID NO: 1176 - protein, 14 aa, Artificial Sequence
  Synthetically generated peptide
CCEWCCVPACTGCY

SEQ ID NO: 1177 - protein, 14 aa, Artificial Sequence
  Synthetically generated peptide
CCEWCCLPACTGCY

SEQ ID NO: 1178 - protein, 14 aa, Artificial Sequence
  Synthetically generated peptide
CCEWCCIPACTGCY

SEQ ID NO: 1179 - protein, 14 aa, Artificial Sequence
  Synthetically generated peptide
CCEWCCPPACTGCY

SEQ ID NO: 1180 - protein, 14 aa, Artificial Sequence
  Synthetically generated peptide
CCEWCCMPACTGCY

SEQ ID NO: 1181 - protein, 14 aa, Artificial Sequence
  Synthetically generated peptide
CCEWCCFPACTGCY

SEQ ID NO: 1182 - protein, 14 aa, Artificial Sequence
  Synthetically generated peptide
CCEWCCWPACTGCY

SEQ ID NO: 1183 - protein, 14 aa, Artificial Sequence
  Synthetically generated peptide
CCEWCCGPACTGCY

SEQ ID NO: 1184 - protein, 14 aa, Artificial Sequence
  Synthetically generated peptide
CCEWCCSPACTGCY

SEQ ID NO: 1185 - protein, 14 aa, Artificial Sequence
  Synthetically generated peptide
CCEWCCTPACTGCY

SEQ ID NO: 1186 - protein, 14 aa, Artificial Sequence
  Synthetically generated peptide
CCEWCCCPACTGCY

SEQ ID NO: 1187 - protein, 14 aa, Artificial Sequence
  Synthetically generated peptide
CCEWCCQPACTGCY

SEQ ID NO: 1188 - protein, 14 aa, Artificial Sequence
  Synthetically generated peptide
CCEWCCYPACTGCY

SEQ ID NO: 1189 - protein, 14 aa, Artificial Sequence
  Synthetically generated peptide
CCEWCCDPACTGCY

SEQ ID NO: 1190 - protein, 14 aa, Artificial Sequence
  Synthetically generated peptide
CCEWCCEPACTGCY

SEQ ID NO: 1191 - protein, 14 aa, Artificial Sequence
  Synthetically generated peptide
CCEWCCKPACTGCY

SEQ ID NO: 1192 - protein, 14 aa, Artificial Sequence
  Synthetically generated peptide
CCEWCCRPACTGCY

SEQ ID NO: 1193 - protein, 14 aa, Artificial Sequence
  Synthetically generated peptide
CCEWCCHPACTGCY

SEQ ID NO: 1194 - protein, 13 aa, Artificial Sequence
  Synthetically generated peptide
CCEWCCAPACTGC

SEQ ID NO: 1195 - protein, 13 aa, Artificial Sequence
  Synthetically generated peptide
CCEWCCVPACTGC

SEQ ID NO: 1196 - protein, 13 aa, Artificial Sequence
  Synthetically generated peptide
CCEWCCLPACTGC

SEQ ID NO: 1197 - protein, 13 aa, Artificial Sequence
  Synthetically generated peptide
CCEWCCIPACTGC

SEQ ID NO: 1198 - protein, 13 aa, Artificial Sequence
  Synthetically generated peptide
CCEWCCPPACTGC

SEQ ID NO: 1199 - protein, 13 aa, Artificial Sequence
  Synthetically generated peptide
CCEWCCMPACTGC

SEQ ID NO: 1200 - protein, 13 aa, Artificial Sequence
  Synthetically generated peptide
CCEWCCFPACTGC

SEQ ID NO: 1201 - protein, 13 aa, Artificial Sequence
  Synthetically generated peptide
CCEWCCWPACTGC

SEQ ID NO: 1202 - protein, 13 aa, Artificial Sequence
  Synthetically generated peptide
CCEWCCGPACTGC

SEQ ID NO: 1203 - protein, 13 aa, Artificial Sequence
  Synthetically generated peptide
CCEWCCSPACTGC

SEQ ID NO: 1204 - protein, 13 aa, Artificial Sequence
  Synthetically generated peptide
CCEWCCTPACTGC

SEQ ID NO: 1205 - protein, 13 aa, Artificial Sequence
  Synthetically generated peptide
CCEWCCCPACTGC

SEQ ID NO: 1206 - protein, 13 aa, Artificial Sequence
  Synthetically generated peptide
CCEWCCQPACTGC

SEQ ID NO: 1207 - protein, 13 aa, Artificial Sequence
  Synthetically generated peptide
CCEWCCYPACTGC

SEQ ID NO: 1208 - protein, 13 aa, Artificial Sequence
  Synthetically generated peptide
CCEWCCDPACTGC

SEQ ID NO: 1209 - protein, 13 aa, Artificial Sequence
  Synthetically generated peptide
CCEWCCEPACTGC

SEQ ID NO: 1210 - protein, 13 aa, Artificial Sequence
  Synthetically generated peptide
CCEWCCKPACTGC

SEQ ID NO: 1211 - protein, 13 aa, Artificial Sequence
  Synthetically generated peptide
CCEWCCRPACTGC

SEQ ID NO: 1212 - protein, 13 aa, Artificial Sequence
  Synthetically generated peptide
CCEWCCHPACTGC

SEQ ID NO: 1213 - protein, 14 aa, Artificial Sequence
  Synthetically generated peptide
CCEWCCNPACTGCA

SEQ ID NO: 1214 - protein, 14 aa, Artificial Sequence
  Synthetically generated peptide
CCEWCCNPACTGCV

SEQ ID NO: 1215 - protein, 14 aa, Artificial Sequence
  Synthetically generated peptide
CCEWCCNPACTGCL

SEQ ID NO: 1216 - protein, 14 aa, Artificial Sequence
  Synthetically generated peptide
CCEWCCNPACTGCI

SEQ ID NO: 1217 - protein, 14 aa, Artificial Sequence
  Synthetically generated peptide
CCEWCCNPACTGCP

SEQ ID NO: 1218 - protein, 14 aa, Artificial Sequence
  Synthetically generated peptide
CCEWCCNPACTGCM

SEQ ID NO: 1219 - protein, 14 aa, Artificial Sequence
  Synthetically generated peptide
CCEWCCNPACTGCF

SEQ ID NO: 1220 - protein, 14 aa, Artificial Sequence
  Synthetically generated peptide
CCEWCCNPACTGCW

SEQ ID NO: 1221 - protein, 14 aa, Artificial Sequence
  Synthetically generated peptide
CCEWCCNPACTGCG

SEQ ID NO: 1222 - protein, 14 aa, Artificial Sequence
  Synthetically generated peptide
CCEWCCNPACTGCS

SEQ ID NO: 1223 - protein, 14 aa, Artificial Sequence
  Synthetically generated peptide
CCEWCCNPACTGCT

SEQ ID NO: 1224 - protein, 14 aa, Artificial Sequence
  Synthetically generated peptide
CCEWCCNPACTGCC

SEQ ID NO: 1225 - protein, 14 aa, Artificial Sequence
  Synthetically generated peptide
CCEWCCNPACTGCN

SEQ ID NO: 1226 - protein, 14 aa, Artificial Sequence
  Synthetically generated peptide
CCEWCCNPACTGCQ

SEQ ID NO: 1227 - protein, 14 aa, Artificial Sequence
  Synthetically generated peptide
CCEWCCNPACTGCD

SEQ ID NO: 1228 - protein, 14 aa, Artificial Sequence
  Synthetically generated peptide
CCEWCCNPACTGCE

SEQ ID NO: 1229 - protein, 14 aa, Artificial Sequence
  Synthetically generated peptide
CCEWCCNPACTGCK

SEQ ID NO: 1230 - protein, 14 aa, Artificial Sequence
  Synthetically generated peptide
CCEWCCNPACTGCR

SEQ ID NO: 1231 - protein, 14 aa, Artificial Sequence
  Synthetically generated peptide
CCEWCCNPACTGCH

SEQ ID NO: 1232 - protein, 14 aa, Artificial Sequence
  Synthetically generated peptide
CCEFCCNPACTGCA

SEQ ID NO: 1233 - protein, 14 aa, Artificial Sequence
  Synthetically generated peptide
CCEFCCNPACTGCV

SEQ ID NO: 1234 - protein, 14 aa, Artificial Sequence
  Synthetically generated peptide
CCEFCCNPACTGCL

SEQ ID NO: 1235 - protein, 14 aa, Artificial Sequence
  Synthetically generated peptide
CCEFCCNPACTGCI

SEQ ID NO: 1236 - protein, 14 aa, Artificial Sequence
  Synthetically generated peptide
CCEFCCNPACTGCP

SEQ ID NO: 1237 - protein, 14 aa, Artificial Sequence
  Synthetically generated peptide
CCEFCCNPACTGCM

SEQ ID NO: 1238 - protein, 14 aa, Artificial Sequence
  Synthetically generated peptide
CCEFCCNPACTGCF

SEQ ID NO: 1239 - protein, 14 aa, Artificial Sequence
  Synthetically generated peptide
CCEFCCNPACTGCW

SEQ ID NO: 1240 - protein, 14 aa, Artificial Sequence
  Synthetically generated peptide
CCEFCCNPACTGCG

SEQ ID NO: 1241 - protein, 14 aa, Artificial Sequence
  Synthetically generated peptide
CCEFCCNPACTGCS

SEQ ID NO: 1242 - protein, 14 aa, Artificial Sequence
  Synthetically generated peptide
CCEFCCNPACTGCT

SEQ ID NO: 1243 - protein, 14 aa, Artificial Sequence
  Synthetically generated peptide
CCEFCCNPACTGCC

SEQ ID NO: 1244 - protein, 14 aa, Artificial Sequence
  Synthetically generated peptide
CCEFCCNPACTGCN

SEQ ID NO: 1245 - protein, 14 aa, Artificial Sequence
  Synthetically generated peptide
CCEFCCNPACTGCQ

SEQ ID NO: 1246 - protein, 14 aa, Artificial Sequence
  Synthetically generated peptide
CCEFCCNPACTGCD

SEQ ID NO: 1247 - protein, 14 aa, Artificial Sequence
  Synthetically generated peptide
CCEFCCNPACTGCE

SEQ ID NO: 1248 - protein, 14 aa, Artificial Sequence
  Synthetically generated peptide
CCEFCCNPACTGCK

SEQ ID NO: 1249 - protein, 14 aa, Artificial Sequence
  Synthetically generated peptide
CCEFCCNPACTGCR

SEQ ID NO: 1250 - protein, 14 aa, Artificial Sequence
  Synthetically generated peptide
CCEFCCNPACTGCH

SEQ ID NO: 1251 - protein, 14 aa, Artificial Sequence
  Synthetically generated peptide
CCAFCCNPACTGCY

SEQ ID NO: 1252 - protein, 14 aa, Artificial Sequence
  Synthetically generated peptide
CCVFCCNPACTGCY

SEQ ID NO: 1253 - protein, 14 aa, Artificial Sequence
  Synthetically generated peptide
CCLFCCNPACTGCY

SEQ ID NO: 1254 - protein, 14 aa, Artificial Sequence
  Synthetically generated peptide
CCIFCCNPACTGCY

SEQ ID NO: 1255 - protein, 14 aa, Artificial Sequence
  Synthetically generated peptide
CCMFCCNPACTGCY

SEQ ID NO: 1256 - protein, 14 aa, Artificial Sequence
  Synthetically generated peptide
CCFFCCNPACTGCY

SEQ ID NO: 1257 - protein, 14 aa, Artificial Sequence
  Synthetically generated peptide
CCWFCCNPACTGCY

SEQ ID NO: 1258 - protein, 14 aa, Artificial Sequence
  Synthetically generated peptide
CCGFCCNPACTGCY

SEQ ID NO: 1259 - protein, 14 aa, Artificial Sequence
  Synthetically generated peptide
CCSFCCNPACTGCY

SEQ ID NO: 1260 - protein, 14 aa, Artificial Sequence
  Synthetically generated peptide
CCTFCCNPACTGCY

SEQ ID NO: 1261 - protein, 14 aa, Artificial Sequence
  Synthetically generated peptide
CCCFCCNPACTGCY

SEQ ID NO: 1262 - protein, 14 aa, Artificial Sequence
  Synthetically generated peptide
CCNFCCNPACTGCY

SEQ ID NO: 1263 - protein, 14 aa, Artificial Sequence
  Synthetically generated peptide
CCQFCCNPACTGCY

SEQ ID NO: 1264 - protein, 14 aa, Artificial Sequence
  Synthetically generated peptide
CCYFCCNPACTGCY

SEQ ID NO: 1265 - protein, 14 aa, Artificial Sequence
  Synthetically generated peptide
CCDFCCNPACTGCY

SEQ ID NO: 1266 - protein, 14 aa, Artificial Sequence
  Synthetically generated peptide
CCKFCCNPACTGCY

SEQ ID NO: 1267 - protein, 14 aa, Artificial Sequence
  Synthetically generated peptide
CCRFCCNPACTGCY

SEQ ID NO: 1268 - protein, 14 aa, Artificial Sequence
  Synthetically generated peptide
CCHFCCNPACTGCY

SEQ ID NO: 1269 - protein, 13 aa, Artificial Sequence
  Synthetically generated peptide
CCAFCCNPACTGC

SEQ ID NO: 1270 - protein, 13 aa, Artificial Sequence
  Synthetically generated peptide
CCVFCCNPACTGC

SEQ ID NO: 1271 - protein, 13 aa, Artificial Sequence
  Synthetically generated peptide
CCLFCCNPACTGC

SEQ ID NO: 1272 - protein, 13 aa, Artificial Sequence
  Synthetically generated peptide
CCIFCCNPACTGC

SEQ ID NO: 1273 - protein, 13 aa, Artificial Sequence
  Synthetically generated peptide
CCMFCCNPACTGC

SEQ ID NO: 1274 - protein, 13 aa, Artificial Sequence
  Synthetically generated peptide
CCFFCCNPACTGC

SEQ ID NO: 1275 - protein, 13 aa, Artificial Sequence
  Synthetically generated peptide
CCWFCCNPACTGC

SEQ ID NO: 1276 - protein, 13 aa, Artificial Sequence
  Synthetically generated peptide
CCGFCCNPACTGC

SEQ ID NO: 1277 - protein, 13 aa, Artificial Sequence
  Synthetically generated peptide
CCSFCCNPACTGC

SEQ ID NO: 1278 - protein, 13 aa, Artificial Sequence
  Synthetically generated peptide
CCTFCCNPACTGC

SEQ ID NO: 1279 - protein, 13 aa, Artificial Sequence
  Synthetically generated peptide
CCCFCCNPACTGC

SEQ ID NO: 1280 - protein, 13 aa, Artificial Sequence
  Synthetically generated peptide
CCNFCCNPACTGC

SEQ ID NO: 1281 - protein, 13 aa, Artificial Sequence
  Synthetically generated peptide
CCQFCCNPACTGC

SEQ ID NO: 1282 - protein, 13 aa, Artificial Sequence
  Synthetically generated peptide
CCYFCCNPACTGC

SEQ ID NO: 1283 - protein, 13 aa, Artificial Sequence
  Synthetically generated peptide
CCDFCCNPACTGC

SEQ ID NO: 1284 - protein, 13 aa, Artificial Sequence
  Synthetically generated peptide
CCKFCCNPACTGC

SEQ ID NO: 1285 - protein, 13 aa, Artificial Sequence
  Synthetically generated peptide
CCRFCCNPACTGC

SEQ ID NO: 1286 - protein, 13 aa, Artificial Sequence
  Synthetically generated peptide
CCHFCCNPACTGC

SEQ ID NO: 1287 - protein, 14 aa, Artificial Sequence
  Synthetically generated peptide
CCAWCCNPACTGCY

SEQ ID NO: 1288 - protein, 14 aa, Artificial Sequence
  Synthetically generated peptide
CCVWCCNPACTGCY

SEQ ID NO: 1289 - protein, 14 aa, Artificial Sequence
  Synthetically generated peptide
CCLWCCNPACTGCY

SEQ ID NO: 1290 - protein, 14 aa, Artificial Sequence
  Synthetically generated peptide
CCIWCCNPACTGCY

SEQ ID NO: 1291 - protein, 14 aa, Artificial Sequence
  Synthetically generated peptide
CCMWCCNPACTGCY

SEQ ID NO: 1292 - protein, 14 aa, Artificial Sequence
  Synthetically generated peptide
CCFWCCNPACTGCY

SEQ ID NO: 1293 - protein, 14 aa, Artificial Sequence
  Synthetically generated peptide
CCWWCCNPACTGCY

SEQ ID NO: 1294 - protein, 14 aa, Artificial Sequence
  Synthetically generated peptide
CCGWCCNPACTGCY

SEQ ID NO: 1295 - protein, 14 aa, Artificial Sequence
  Synthetically generated peptide
CCSWCCNPACTGCY

SEQ ID NO: 1296 - protein, 14 aa, Artificial Sequence
  Synthetically generated peptide
CCTWCCNPACTGCY

SEQ ID NO: 1297 - protein, 14 aa, Artificial Sequence
  Synthetically generated peptide
CCCWCCNPACTGCY

SEQ ID NO: 1298 - protein, 14 aa, Artificial Sequence
  Synthetically generated peptide
CCNWCCNPACTGCY

SEQ ID NO: 1299 - protein, 14 aa, Artificial Sequence
  Synthetically generated peptide
CCQWCCNPACTGCY

SEQ ID NO: 1300 - protein, 14 aa, Artificial Sequence
  Synthetically generated peptide
CCYWCCNPACTGCY

SEQ ID NO: 1301 - protein, 14 aa, Artificial Sequence
  Synthetically generated peptide
CCDWCCNPACTGCY

SEQ ID NO: 1302 - protein, 14 aa, Artificial Sequence
  Synthetically generated peptide
CCKWCCNPACTGCY

SEQ ID NO: 1303 - protein, 14 aa, Artificial Sequence
  Synthetically generated peptide
CCRWCCNPACTGCY

SEQ ID NO: 1304 - protein, 14 aa, Artificial Sequence
  Synthetically generated peptide
CCHWCCNPACTGCY

SEQ ID NO: 1305 - protein, 13 aa, Artificial Sequence
  Synthetically generated peptide
CCAWCCNPACTGC

SEQ ID NO: 1306 - protein, 13 aa, Artificial Sequence
  Synthetically generated peptide
CCVWCCNPACTGC

SEQ ID NO: 1307 - protein, 13 aa, Artificial Sequence
  Synthetically generated peptide
CCLWCCNPACTGC

SEQ ID NO: 1308 - protein, 13 aa, Artificial Sequence
  Synthetically generated peptide
CCIWCCNPACTGC

SEQ ID NO: 1309 - protein, 13 aa, Artificial Sequence
  Synthetically generated peptide
CCMWCCNPACTGC

SEQ ID NO: 1310 - protein, 13 aa, Artificial Sequence
  Synthetically generated peptide
CCFWCCNPACTGC

SEQ ID NO: 1311 - protein, 13 aa, Artificial Sequence
  Synthetically generated peptide
CCWWCCNPACTGC

SEQ ID NO: 1312 - protein, 13 aa, Artificial Sequence
  Synthetically generated peptide
CCGWCCNPACTGC

SEQ ID NO: 1313 - protein, 13 aa, Artificial Sequence
  Synthetically generated peptide
CCSWCCNPACTGC

SEQ ID NO: 1314 - protein, 13 aa, Artificial Sequence
  Synthetically generated peptide
CCTWCCNPACTGC

SEQ ID NO: 1315 - protein, 13 aa, Artificial Sequence
  Synthetically generated peptide
CCCWCCNPACTGC

SEQ ID NO: 1316 - protein, 13 aa, Artificial Sequence
  Synthetically generated peptide
CCNWCCNPACTGC

SEQ ID NO: 1317 - protein, 13 aa, Artificial Sequence
  Synthetically generated peptide
CCQWCCNPACTGC

SEQ ID NO: 1318 - protein, 13 aa, Artificial Sequence
  Synthetically generated peptide
CCYWCCNPACTGC

SEQ ID NO: 1319 - protein, 13 aa, Artificial Sequence
  Synthetically generated peptide
CCDWCCNPACTGC

SEQ ID NO: 1320 - protein, 13 aa, Artificial Sequence
  Synthetically generated peptide
CCKWCCNPACTGC

SEQ ID NO: 1321 - protein, 13 aa, Artificial Sequence
  Synthetically generated peptide
CCRWCCNPACTGC

SEQ ID NO: 1322 - protein, 13 aa, Artificial Sequence
  Synthetically generated peptide
CCHWCCNPACTGC

SEQ ID NO: 1323 - protein, 18 aa, Artificial Sequence
  Synthetically generated peptide
  VARIANT (3)..(5): Xaa = Any Amino Acid
  misc_feature (9)..(9): Xaa can be any naturally occurring amino acid
  misc_feature (16)..(16): Xaa can be any naturally occurring amino acid
CCXEXYCCXNPACTGXCY

SEQ ID NO: 1324 - protein, 18 aa, Artificial Sequence
  Synthetically generated peptide
  VARIANT (3)..(5): Xaa = Any Amino Acid
  misc_feature (9)..(9): Xaa can be any naturally occurring amino acid
  misc_feature (17)..(17): Xaa can be any naturally occurring amino acid
CCXEXYCCXNPACTGCXY

SEQ ID NO: 1325 - protein, 17 aa, Artificial Sequence
  Synthetically generated peptide
  VARIANT (3)..(5): Xaa = Any Amino Acid
  misc_feature (10)..(10): Xaa can be any naturally occurring amino acid
CCXEXYCCNXPACTGCY

SEQ ID NO: 1326 - protein, 18 aa, Artificial Sequence
  Synthetically generated peptide
  VARIANT (3)..(5): Xaa = Any Amino Acid
  misc_feature (10)..(11): Xaa can be any naturally occurring amino acid
CCXEXYCCNXXPACTGCY

SEQ ID NO: 1327 - protein, 18 aa, Artificial Sequence
  Synthetically generated peptide
  VARIANT (3)..(5): Xaa = Any Amino Acid
  misc_feature (10)..(10): Xaa can be any naturally occurring amino acid
  misc_feature (12)..(12): Xaa can be any naturally occurring amino acid
CCXEXYCCNXPXACTGCY

SEQ ID NO: 1328 - protein, 18 aa, Artificial Sequence
  Synthetically generated peptide
  VARIANT (3)..(5): Xaa = Any Amino Acid
  misc_feature (10)..(10): Xaa can be any naturally occurring amino acid
  misc_feature (13)..(13): Xaa can be any naturally occurring amino acid
CCXEXYCCNXPAXCTGCY

SEQ ID NO: 1329 - protein, 18 aa, Artificial Sequence
  Synthetically generated peptide
  VARIANT (3)..(5): Xaa = Any Amino Acid
  misc_feature (10)..(10): Xaa can be any naturally occurring amino acid
  misc_feature (14)..(14): Xaa can be any naturally occurring amino acid
CCXEXYCCNXPACXTGCY

SEQ ID NO: 1330 - protein, 18 aa, Artificial Sequence
  Synthetically generated peptide
  VARIANT (3)..(5): Xaa = Any Amino Acid
  misc_feature (10)..(10): Xaa can be any naturally occurring amino acid
  misc_feature (15)..(15): Xaa can be any naturally occurring amino acid
CCXEXYCCNXPACTXGCY

SEQ ID NO: 1331 - protein, 18 aa, Artificial Sequence
  Synthetically generated peptide
  VARIANT (3)..(5): Xaa = Any Amino Acid
  misc_feature (10)..(10): Xaa can be any naturally occurring amino acid
  misc_feature (16)..(16): Xaa can be any naturally occurring amino acid
CCXEXYCCNXPACTGXCY

SEQ ID NO: 1332 - protein, 18 aa, Artificial Sequence
  Synthetically generated peptide
  VARIANT (3)..(5): Xaa = Any Amino Acid
  misc_feature (10)..(10): Xaa can be any naturally occurring amino acid
  misc_feature (17)..(17): Xaa can be any naturally occurring amino acid
CCXEXYCCNXPACTGCXY

SEQ ID NO: 1333 - protein, 17 aa, Artificial Sequence
  Synthetically generated peptide
  VARIANT (3)..(5): Xaa = Any Amino Acid
  misc_feature (11)..(11): Xaa can be any naturally occurring amino acid
CCXEXYCCNPXACTGCY

SEQ ID NO: 1334 - protein, 18 aa, Artificial Sequence
  Synthetically generated peptide
  VARIANT (3)..(5): Xaa = Any Amino Acid
  misc_feature (11)..(12): Xaa can be any naturally occurring amino acid
CCXEXYCCNPXXACTGCY

SEQ ID NO: 1335 - protein, 18 aa, Artificial Sequence
  Synthetically generated peptide
  VARIANT (3)..(5): Xaa = Any Amino Acid
  misc_feature (11)..(11): Xaa can be any naturally occurring amino acid
  misc_feature (13)..(13): Xaa can be any naturally occurring amino acid
CCXEXYCCNPXAXCTGCY

SEQ ID NO: 1336 - protein, 18 aa, Artificial Sequence
  Synthetically generated peptide
  VARIANT (3)..(5): Xaa = Any Amino Acid
  misc_feature (11)..(11): Xaa can be any naturally occurring amino acid
  misc_feature (14)..(14): Xaa can be any naturally occurring amino acid
CCXEXYCCNPXACXTGCY

SEQ ID NO: 1337 - protein, 18 aa, Artificial Sequence
  Synthetically generated peptide
  VARIANT (3)..(5): Xaa = Any Amino Acid
  misc_feature (11)..(11): Xaa can be any naturally occurring amino acid
  misc_feature (15)..(15): Xaa can be any naturally occurring amino acid
CCXEXYCCNPXACTXGCY

SEQ ID NO: 1338 - protein, 18 aa, Artificial Sequence
  Synthetically generated peptide
  VARIANT (3)..(5): Xaa = Any Amino Acid
  misc_feature (11)..(11): Xaa can be any naturally occurring amino acid
  misc_feature (16)..(16): Xaa can be any naturally occurring amino acid
CCXEXYCCNPXACTGXCY

SEQ ID NO: 1339 - protein, 18 aa, Artificial Sequence
  Synthetically generated peptide
  VARIANT (3)..(5): Xaa = Any Amino Acid
  misc_feature (11)..(11): Xaa can be any naturally occurring amino acid
  misc_feature (17)..(17): Xaa can be any naturally occurring amino acid
CCXEXYCCNPXACTGCXY

SEQ ID NO: 1340 - protein, 17 aa, Artificial Sequence
  Synthetically generated peptide
  VARIANT (3)..(5): Xaa = Any Amino Acid
  misc_feature (12)..(12): Xaa can be any naturally occurring amino acid
CCXEXYCCNPAXCTGCY

SEQ ID NO: 1341 - protein, 18 aa, Artificial Sequence
  Synthetically generated peptide
  VARIANT (3)..(5): Xaa = Any Amino Acid
  misc_feature (12)..(13): Xaa can be any naturally occurring amino acid
CCXEXYCCNPAXXCTGCY

SEQ ID NO: 1342 - protein, 18 aa, Artificial Sequence
  Synthetically generated peptide
  VARIANT (3)..(5): Xaa = Any Amino Acid
  misc_feature (12)..(12): Xaa can be any naturally occurring amino acid
  misc_feature (14)..(14): Xaa can be any naturally occurring amino acid
CCXEXYCCNPAXCXTGCY

SEQ ID NO: 1343 - protein, 18 aa, Artificial Sequence
  Synthetically generated peptide
  VARIANT (3)..(5): Xaa = Any Amino Acid
  misc_feature (12)..(12): Xaa can be any naturally occurring amino acid
  misc_feature (15)..(15): Xaa can be any naturally occurring amino acid
CCXEXYCCNPAXCTXGCY

SEQ ID NO: 1344 - protein, 18 aa, Artificial Sequence
  Synthetically generated peptide
  VARIANT (3)..(5): Xaa = Any Amino Acid
  misc_feature (12)..(12): Xaa can be any naturally occurring amino acid
  misc_feature (16)..(16): Xaa can be any naturally occurring amino acid
CCXEXYCCNPAXCTGXCY

SEQ ID NO: 1345 - protein, 18 aa, Artificial Sequence
  Synthetically generated peptide
  VARIANT (3)..(5): Xaa = Any Amino Acid
  misc_feature (12)..(12): Xaa can be any naturally occurring amino acid
  misc_feature (17)..(17): Xaa can be any naturally occurring amino acid
CCXEXYCCNPAXCTGCXY

SEQ ID NO: 1346 - protein, 17 aa, Artificial Sequence
  Synthetically generated peptide
  VARIANT (3)..(5): Xaa = Any Amino Acid
  misc_feature (13)..(13): Xaa can be any naturally occurring amino acid
CCXEXYCCNPACXTGCY

SEQ ID NO: 1347 - protein, 18 aa, Artificial Sequence
  Synthetically generated peptide
  VARIANT (3)..(5): Xaa = Any Amino Acid
  misc_feature (13)..(14): Xaa can be any naturally occurring amino acid
CCXEXYCCNPACXXTGCY

SEQ ID NO: 1348 - protein, 18 aa, Artificial Sequence
  Synthetically generated peptide
  VARIANT (3)..(5): Xaa = Any Amino Acid
  misc_feature (13)..(13): Xaa can be any naturally occurring amino acid
  misc_feature (15)..(15): Xaa can be any naturally occurring amino acid
CCXEXYCCNPACXTXGCY

SEQ ID NO: 1349 - protein, 18 aa, Artificial Sequence
  Synthetically generated peptide
  VARIANT (3)..(5): Xaa = Any Amino Acid
  misc_feature (13)..(13): Xaa can be any naturally occurring amino acid
  misc_feature (16)..(16): Xaa can be any naturally occurring amino acid
CCXEXYCCNPACXTGXCY

SEQ ID NO: 1350 - protein, 18 aa, Artificial Sequence
  Synthetically generated peptide
  VARIANT (3)..(5): Xaa = Any Amino Acid
  misc_feature (13)..(13): Xaa can be any naturally occurring amino acid
  misc_feature (17)..(17): Xaa can be any naturally occurring amino acid
CCXEXYCCNPACXTGCXY

SEQ ID NO: 1351 - protein, 17 aa, Artificial Sequence
  Synthetically generated peptide
  VARIANT (3)..(5): Xaa = Any Amino Acid
  misc_feature (14)..(14): Xaa can be any naturally occurring amino acid
CCXEXYCCNPACTXGCY

SEQ ID NO: 1352 - protein, 18 aa, Artificial Sequence
  Synthetically generated peptide
  VARIANT (3)..(5): Xaa = Any Amino Acid
  misc_feature (14)..(15): Xaa can be any naturally occurring amino acid
CCXEXYCCNPACTXXGCY

SEQ ID NO: 1353 - protein, 18 aa, Artificial Sequence
  Synthetically generated peptide
  VARIANT (3)..(5): Xaa = Any Amino Acid
  misc_feature (14)..(14): Xaa can be any naturally occurring amino acid
  misc_feature (16)..(16): Xaa can be any naturally occurring amino acid
CCXEXYCCNPACTXGXCY

SEQ ID NO: 1354 - protein, 18 aa, Artificial Sequence
  Synthetically generated peptide
  VARIANT (3)..(5): Xaa = Any Amino Acid
  misc_feature (14)..(14): Xaa can be any naturally occurring amino acid
  misc_feature (17)..(17): Xaa can be any naturally occurring amino acid
CCXEXYCCNPACTXGCXY

SEQ ID NO: 1355 - protein, 17 aa, Artificial Sequence
  Synthetically generated peptide
  VARIANT (3)..(5): Xaa = Any Amino Acid
  misc_feature (15)..(15): Xaa can be any naturally occurring amino acid
CCXEXYCCNPACTGXCY

SEQ ID NO: 1356 - protein, 18 aa, Artificial Sequence
  Synthetically generated peptide
  VARIANT (3)..(5): Xaa = Any Amino Acid
  misc_feature (15)..(16): Xaa can be any naturally occurring amino acid
CCXEXYCCNPACTGXXCY

SEQ ID NO: 1357 - protein, 18 aa, Artificial Sequence
  Synthetically generated peptide
  VARIANT (3)..(5): Xaa = Any Amino Acid
  misc_feature (15)..(15): Xaa can be any naturally occurring amino acid
  misc_feature (17)..(17): Xaa can be any naturally occurring amino acid
CCXEXYCCNPACTGXCXY

SEQ ID NO: 1358 - protein, 17 aa, Artificial Sequence
  Synthetically generated peptide
  VARIANT (3)..(5): Xaa = Any Amino Acid
  misc_feature (16)..(16): Xaa can be any naturally occurring amino acid
CCXEXYCCNPACTGCXY

SEQ ID NO: 1359 - protein, 18 aa, Artificial Sequence
  Synthetically generated peptide
  VARIANT (3)..(5): Xaa = Any Amino Acid
  misc_feature (16)..(17): Xaa can be any naturally occurring amino acid
CCXEXYCCNPACTGCXXY

SEQ ID NO: 1360 - protein, 16 aa, Artificial Sequence
  Synthetically generated peptide
  VARIANT (3)..(6): Xaa = Any Amino Acid
CCXEYXCCNPACTGCY

SEQ ID NO: 1361 - protein, 17 aa, Artificial Sequence
  Synthetically generated peptide
  VARIANT (3)..(6): Xaa = Any Amino Acid
  misc_feature (7)..(7): Xaa can be any naturally occurring amino acid
CCXEYXXCCNPACTGCY

SEQ ID NO: 1362 - protein, 18 aa, Artificial Sequence
  Synthetically generated peptide
  VARIANT (3)..(6): Xaa = Any Amino Acid
  misc_feature (7)..(8): Xaa can be any naturally occurring amino acid
CCXEYXXXCCNPACTGCY

SEQ ID NO: 1363 - protein, 18 aa, Artificial Sequence
  Synthetically generated peptide
  VARIANT (3)..(6): Xaa = Any Amino Acid
  misc_feature (7)..(7): Xaa can be any naturally occurring amino acid
  misc_feature (10)..(10): Xaa can be any naturally occurring amino acid
CCXEYXXCCXNPACTGCY

SEQ ID NO: 1364 - protein, 18 aa, Artificial Sequence
  Synthetically generated peptide
  VARIANT (3)..(6): Xaa = Any Amino Acid
  misc_feature (7)..(7): Xaa can be any naturally occurring amino acid
  misc_feature (11)..(11): Xaa can be any naturally occurring amino acid
CCXEYXXCCNXPACTGCY

SEQ ID NO: 1365 - protein, 18 aa, Artificial Sequence
  Synthetically generated peptide
  VARIANT (3)..(6): Xaa = Any Amino Acid
  misc_feature (7)..(7): Xaa can be any naturally occurring amino acid
  misc_feature (12)..(12): Xaa can be any naturally occurring amino acid
CCXEYXXCCNPXACTGCY

SEQ ID NO: 1366 - protein, 18 aa, Artificial Sequence
  Synthetically generated peptide
  VARIANT (3)..(6): Xaa = Any Amino Acid
  misc_feature (7)..(7): Xaa can be any naturally occurring amino acid
  misc_feature (13)..(13): Xaa can be any naturally occurring amino acid
CCXEYXXCCNPAXCTGCY

SEQ ID NO: 1367 - protein, 18 aa, Artificial Sequence
  Synthetically generated peptide
  VARIANT (3)..(6): Xaa = Any Amino Acid
  misc_feature (7)..(7): Xaa can be any naturally occurring amino acid
  misc_feature (14)..(14): Xaa can be any naturally occurring amino acid
CCXEYXXCCNPACXTGCY

SEQ ID NO: 1368 - protein, 18 aa, Artificial Sequence
  Synthetically generated peptide
  VARIANT (3)..(6): Xaa = Any Amino Acid
  misc_feature (7)..(7): Xaa can be any naturally occurring amino acid
  misc_feature (15)..(15): Xaa can be any naturally occurring amino acid
CCXEYXXCCNPACTXGCY

SEQ ID NO: 1369 - protein, 18 aa, Artificial Sequence
  Synthetically generated peptide
  VARIANT (3)..(6): Xaa = Any Amino Acid
  misc_feature (7)..(7): Xaa can be any naturally occurring amino acid
  misc_feature (16)..(16): Xaa can be any naturally occurring amino acid
CCXEYXXCCNPACTGXCY

SEQ ID NO: 1370 - protein, 18 aa, Artificial Sequence
  Synthetically generated peptide
  VARIANT (3)..(6): Xaa = Any Amino Acid
  misc_feature (7)..(7): Xaa can be any naturally occurring amino acid
  misc_feature (17)..(17): Xaa can be any naturally occurring amino acid
CCXEYXXCCNPACTGCXY

SEQ ID NO: 1371 - protein, 17 aa, Artificial Sequence
  Synthetically generated peptide
  VARIANT (3)..(6): Xaa = Any Amino Acid
  misc_feature (9)..(9): Xaa can be any naturally occurring amino acid
CCXEYXCCXNPACTGCY

SEQ ID NO: 1372 - protein, 18 aa, Artificial Sequence
  Synthetically generated peptide
  VARIANT (3)..(6): Xaa = Any Amino Acid
  misc_feature (9)..(10): Xaa can be any naturally occurring amino acid
CCXEYXCCXXNPACTGCY

SEQ ID NO: 1373 - protein, 18 aa, Artificial Sequence
  Synthetically generated peptide
  VARIANT (3)..(6): Xaa = Any Amino Acid
  misc_feature (9)..(9): Xaa can be any naturally occurring amino acid
  misc_feature (11)..(11): Xaa can be any naturally occurring amino acid
CCXEYXCCXNXPACTGCY

SEQ ID NO: 1374 - protein, 18 aa, Artificial Sequence
  Synthetically generated peptide
  VARIANT (3)..(6): Xaa = Any Amino Acid
  misc_feature (9)..(9): Xaa can be any naturally occurring amino acid
  misc_feature (12)..(12): Xaa can be any naturally occurring amino acid
CCXEYXCCXNPXACTGCY

SEQ ID NO: 1375 - protein, 18 aa, Artificial Sequence
  Synthetically generated peptide
  VARIANT (3)..(6): Xaa = Any Amino Acid
  misc_feature (9)..(9): Xaa can be any naturally occurring amino acid
  misc_feature (13)..(13): Xaa can be any naturally occurring amino acid
CCXEYXCCXNPAXCTGCY

SEQ ID NO: 1376 - protein, 18 aa, Artificial Sequence
  Synthetically generated peptide
  VARIANT (3)..(6): Xaa = Any Amino Acid
  misc_feature (9)..(9): Xaa can be any naturally occurring amino acid
  misc_feature (14)..(14): Xaa can be any naturally occurring amino acid
CCXEYXCCXNPACXTGCY

SEQ ID NO: 1377 - protein, 18 aa, Artificial Sequence
  Synthetically generated peptide
  VARIANT (3)..(6): Xaa = Any Amino Acid
  misc_feature (9)..(9): Xaa can be any naturally occurring amino acid
  misc_feature (15)..(15): Xaa can be any naturally occurring amino acid
CCXEYXCCXNPACTXGCY

SEQ ID NO: 1378 - protein, 18 aa, Artificial Sequence
  Synthetically generated peptide
  VARIANT (3)..(6): Xaa = Any Amino Acid
  misc_feature (9)..(9): Xaa can be any naturally occurring amino acid
  misc_feature (16)..(16): Xaa can be any naturally occurring amino acid
CCXEYXCCXNPACTGXCY

SEQ ID NO: 1379 - protein, 18 aa, Artificial Sequence
  Synthetically generated peptide
  VARIANT (3)..(6): Xaa = Any Amino Acid
  misc_feature (9)..(9): Xaa can be any naturally occurring amino acid
  misc_feature (17)..(17): Xaa can be any naturally occurring amino acid
CCXEYXCCXNPACTGCXY

SEQ ID NO: 1380 - protein, 17 aa, Artificial Sequence
  Synthetically generated peptide
  VARIANT (3)..(6): Xaa = Any Amino Acid
  misc_feature (10)..(10): Xaa can be any naturally occurring amino acid
CCXEYXCCNXPACTGCY

SEQ ID NO: 1381 - protein, 18 aa, Artificial Sequence
  Synthetically generated peptide
  VARIANT (3)..(6): Xaa = Any Amino Acid
  misc_feature (10)..(11): Xaa can be any naturally occurring amino acid
CCXEYXCCNXXPACTGCY

SEQ ID NO: 1382 - protein, 18 aa, Artificial Sequence
  Synthetically generated peptide
  VARIANT (3)..(6): Xaa = Any Amino Acid
  misc_feature (10)..(10): Xaa can be any naturally occurring amino acid
  misc_feature (12)..(12): Xaa can be any naturally occurring amino acid
CCXEYXCCNXPXACTGCY

SEQ ID NO: 1383 - protein, 18 aa, Artificial Sequence
  Synthetically generated peptide
  VARIANT (3)..(6): Xaa = Any Amino Acid
  misc_feature (10)..(10): Xaa can be any naturally occurring amino acid
  misc_feature (13)..(13): Xaa can be any naturally occurring amino acid
CCXEYXCCNXPAXCTGCY

SEQ ID NO: 1384 - protein, 18 aa, Artificial Sequence
  Synthetically generated peptide
  VARIANT (3)..(6): Xaa = Any Amino Acid
  misc_feature (10)..(10): Xaa can be any naturally occurring amino acid
  misc_feature (14)..(14): Xaa can be any naturally occurring amino acid
CCXEYXCCNXPACXTGCY

SEQ ID NO: 1385 - protein, 18 aa, Artificial Sequence
  Synthetically generated peptide
  VARIANT (3)..(6): Xaa = Any Amino Acid
  misc_feature (10)..(10): Xaa can be any naturally occurring amino acid
  misc_feature (15)..(15): Xaa can be any naturally occurring amino acid
CCXEYXCCNXPACTXGCY

SEQ ID NO: 1386 - protein, 18 aa, Artificial Sequence
  Synthetically generated peptide
  VARIANT (3)..(6): Xaa = Any Amino Acid
  misc_feature (10)..(10): Xaa can be any naturally occurring amino acid
  misc_feature (16)..(16): Xaa can be any naturally occurring amino acid
CCXEYXCCNXPACTGXCY

SEQ ID NO: 1387 - protein, 18 aa, Artificial Sequence
  Synthetically generated peptide
  VARIANT (3)..(6): Xaa = Any Amino Acid
  misc_feature (10)..(10): Xaa can be any naturally occurring amino acid
  misc_feature (17)..(17): Xaa can be any naturally occurring amino acid
CCXEYXCCNXPACTGCXY

SEQ ID NO: 1388 - protein, 17 aa, Artificial Sequence
  Synthetically generated peptide
  VARIANT (3)..(6): Xaa = Any Amino Acid
  misc_feature (11)..(11): Xaa can be any naturally occurring amino acid
CCXEYXCCNPXACTGCY

SEQ ID NO: 1389 - protein, 18 aa, Artificial Sequence
  Synthetically generated peptide
  VARIANT (3)..(6): Xaa = Any Amino Acid
  misc_feature (11)..(12): Xaa can be any naturally occurring amino acid
CCXEYXCCNPXXACTGCY

SEQ ID NO: 1390 - protein, 18 aa, Artificial Sequence
  Synthetically generated peptide
  VARIANT (3)..(6): Xaa = Any Amino Acid
  misc_feature (11)..(11): Xaa can be any naturally occurring amino acid
  misc_feature (13)..(13): Xaa can be any naturally occurring amino acid
CCXEYXCCNPXAXCTGCY

SEQ ID NO: 1391 - protein, 18 aa, Artificial Sequence
  Synthetically generated peptide
  VARIANT (3)..(6): Xaa = Any Amino Acid
  misc_feature (11)..(11): Xaa can be any naturally occurring amino acid
  misc_feature (14)..(14): Xaa can be any naturally occurring amino acid
CCXEYXCCNPXACXTGCY

SEQ ID NO: 1392 - protein, 18 aa, Artificial Sequence
  Synthetically generated peptide
  VARIANT (3)..(6): Xaa = Any Amino Acid
  misc_feature (11)..(11): Xaa can be any naturally occurring amino acid
  misc_feature (15)..(15): Xaa can be any naturally occurring amino acid
CCXEYXCCNPXACTXGCY

SEQ ID NO: 1393 - protein, 18 aa, Artificial Sequence
  Synthetically generated peptide
  VARIANT (3)..(6): Xaa = Any Amino Acid
  misc_feature (11)..(11): Xaa can be any naturally occurring amino acid
  misc_feature (16)..(16): Xaa can be any naturally occurring amino acid
CCXEYXCCNPXACTGXCY

SEQ ID NO: 1394 - protein, 18 aa, Artificial Sequence
  Synthetically generated peptide
  VARIANT (3)..(6): Xaa = Any Amino Acid
  misc_feature (11)..(11): Xaa can be any naturally occurring amino acid
  misc_feature (17)..(17): Xaa can be any naturally occurring amino acid
CCXEYXCCNPXACTGCXY

SEQ ID NO: 1395 - protein, 17 aa, Artificial Sequence
  Synthetically generated peptide
  VARIANT (3)..(6): Xaa = Any Amino Acid
  misc_feature (12)..(12): Xaa can be any naturally occurring amino acid
CCXEYXCCNPAXCTGCY

SEQ ID NO: 1396 - protein, 18 aa, Artificial Sequence
  Synthetically generated peptide
  VARIANT (3)..(6): Xaa = Any Amino Acid
  misc_feature (12)..(13): Xaa can be any naturally occurring amino acid
CCXEYXCCNPAXXCTGCY

SEQ ID NO: 1397 - protein, 18 aa, Artificial Sequence
  Synthetically generated peptide
  VARIANT (3)..(6): Xaa = Any Amino Acid
  misc_feature (12)..(12): Xaa can be any naturally occurring amino acid
  misc_feature (14)..(14): Xaa can be any naturally occurring amino acid
CCXEYXCCNPAXCXTGCY

SEQ ID NO: 1398 - protein, 18 aa, Artificial Sequence
  Synthetically generated peptide
  VARIANT (3)..(6): Xaa = Any Amino Acid
  misc_feature (12)..(12): Xaa can be any naturally occurring amino acid
  misc_feature (15)..(15): Xaa can be any naturally occurring amino acid
CCXEYXCCNPAXCTXGCY

SEQ ID NO: 1399 - protein, 18 aa, Artificial Sequence
  Synthetically generated peptide
  VARIANT (3)..(6): Xaa = Any Amino Acid
  misc_feature (12)..(12): Xaa can be any naturally occurring amino acid
  misc_feature (16)..(16): Xaa can be any naturally occurring amino acid
CCXEYXCCNPAXCTGXCY

SEQ ID NO: 1400 - protein, 18 aa, Artificial Sequence
  Synthetically generated peptide
  VARIANT (3)..(6): Xaa = Any Amino Acid
  misc_feature (12)..(12): Xaa can be any naturally occurring amino acid
  misc_feature (17)..(17): Xaa can be any naturally occurring amino acid
CCXEYXCCNPAXCTGCXY

SEQ ID NO: 1401 - protein, 17 aa, Artificial Sequence
  Synthetically generated peptide
  VARIANT (3)..(6): Xaa = Any Amino Acid
  misc_feature (13)..(13): Xaa can be any naturally occurring amino acid
CCXEYXCCNPACXTGCY

SEQ ID NO: 1402 - protein, 18 aa, Artificial Sequence
  Synthetically generated peptide
  VARIANT (3)..(6): Xaa = Any Amino Acid
  misc_feature (13)..(14): Xaa can be any naturally occurring amino acid
CCXEYXCCNPACXXTGCY

SEQ ID NO: 1403 - protein, 18 aa, Artificial Sequence
  Synthetically generated peptide
  VARIANT (3)..(6): Xaa = Any Amino Acid
  misc_feature (13)..(13): Xaa can be any naturally occurring amino acid
  misc_feature (15)..(15): Xaa can be any naturally occurring amino acid
CCXEYXCCNPACXTXGCY

SEQ ID NO: 1404 - protein, 18 aa, Artificial Sequence
  Synthetically generated peptide
  VARIANT (3)..(6): Xaa = Any Amino Acid
  misc_feature (13)..(13): Xaa can be any naturally occurring amino acid
  misc_feature (16)..(16): Xaa can be any naturally occurring amino acid
CCXEYXCCNPACXTGXCY

SEQ ID NO: 1405 - protein, 18 aa, Artificial Sequence
  Synthetically generated peptide
  VARIANT (3)..(6): Xaa = Any Amino Acid
  misc_feature (13)..(13): Xaa can be any naturally occurring amino acid
  misc_feature (17)..(17): Xaa can be any naturally occurring amino acid
CCXEYXCCNPACXTGCXY

SEQ ID NO: 1406 - protein, 17 aa, Artificial Sequence
  Synthetically generated peptide
  VARIANT (3)..(6): Xaa = Any Amino Acid
  misc_feature (14)..(14): Xaa can be any naturally occurring amino acid
CCXEYXCCNPACTXGCY

SEQ ID NO: 1407 - protein, 18 aa, Artificial Sequence
  Synthetically generated peptide
  VARIANT (3)..(6): Xaa = Any Amino Acid
  misc_feature (14)..(15): Xaa can be any naturally occurring amino acid
CCXEYXCCNPACTXXGCY

SEQ ID NO: 1408 - protein, 18 aa, Artificial Sequence
  Synthetically generated peptide
  VARIANT (3)..(6): Xaa = Any Amino Acid
  misc_feature (14)..(14): Xaa can be any naturally occurring amino acid
  misc_feature (16)..(16): Xaa can be any naturally occurring amino acid
CCXEYXCCNPACTXGXCY

SEQ ID NO: 1409 - protein, 18 aa, Artificial Sequence
  Synthetically generated peptide
  VARIANT (3)..(6): Xaa = Any Amino Acid
  misc_feature (14)..(14): Xaa can be any naturally occurring amino acid
  misc_feature (17)..(17): Xaa can be any naturally occurring amino acid
CCXEYXCCNPACTXGCXY

SEQ ID NO: 1410 - protein, 17 aa, Artificial Sequence
  Synthetically generated peptide
  VARIANT (3)..(6): Xaa = Any Amino Acid
  misc_feature (15)..(15): Xaa can be any naturally occurring amino acid
CCXEYXCCNPACTGXCY

SEQ ID NO: 1411 - protein, 18 aa, Artificial Sequence
  Synthetically generated peptide
  VARIANT (3)..(6): Xaa = Any Amino Acid
  misc_feature (15)..(16): Xaa can be any naturally occurring amino acid
CCXEYXCCNPACTGXXCY

SEQ ID NO: 1412 - protein, 18 aa, Artificial Sequence
  Synthetically generated peptide
  VARIANT (3)..(6): Xaa = Any Amino Acid
  misc_feature (15)..(15): Xaa can be any naturally occurring amino acid
  misc_feature (17)..(17): Xaa can be any naturally occurring amino acid
CCXEYXCCNPACTGXCXY

SEQ ID NO: 1413 - protein, 17 aa, Artificial Sequence
  Synthetically generated peptide
  VARIANT (3)..(6): Xaa = Any Amino Acid
  misc_feature (16)..(16): Xaa can be any naturally occurring amino acid
CCXEYXCCNPACTGCXY

SEQ ID NO: 1414 - protein, 18 aa, Artificial Sequence
  Synthetically generated peptide
  VARIANT (3)..(6): Xaa = Any Amino Acid
  misc_feature (16)..(17): Xaa can be any naturally occurring amino acid
CCXEYXCCNPACTGCXXY

SEQ ID NO: 1415 - protein, 16 aa, Artificial Sequence
  Synthetically generated peptide
  VARIANT (3)..(8): Xaa = Any Amino Acid
CCXEYCCXNPACTGCY

SEQ ID NO: 1416 - protein, 17 aa, Artificial Sequence
  Synthetically generated peptide
  VARIANT (3)..(8): Xaa = Any Amino Acid
  misc_feature (9)..(9): Xaa can be any naturally occurring amino acid
CCXEYCCXXNPACTGCY

SEQ ID NO: 1417 - protein, 18 aa, Artificial Sequence
  Synthetically generated peptide
  VARIANT (3)..(8): Xaa = Any Amino Acid
  misc_feature (9)..(10): Xaa can be any naturally occurring amino acid
CCXEYCCXXXNPACTGCY

SEQ ID NO: 1418 - protein, 18 aa, Artificial Sequence
  Synthetically generated peptide
  VARIANT (3)..(8): Xaa = Any Amino Acid
  misc_feature (9)..(9): Xaa can be any naturally occurring amino acid
  misc_feature (11)..(11): Xaa can be any naturally occurring amino acid
CCXEYCCXXNXPACTGCY

SEQ ID NO: 1419 - protein, 18 aa, Artificial Sequence
  Synthetically generated peptide
  VARIANT (3)..(8): Xaa = Any Amino Acid
  misc_feature (9)..(9): Xaa can be any naturally occurring amino acid
  misc_feature (12)..(12): Xaa can be any naturally occurring amino acid
CCXEYCCXXNPXACTGCY

SEQ ID NO: 1420 - protein, 18 aa, Artificial Sequence
  Synthetically generated peptide
  VARIANT (3)..(8): Xaa = Any Amino Acid
  misc_feature (9)..(9): Xaa can be any naturally occurring amino acid
  misc_feature (13)..(13): Xaa can be any naturally occurring amino acid
CCXEYCCXXNPAXCTGCY

SEQ ID NO: 1421 - protein, 18 aa, Artificial Sequence
  Synthetically generated peptide
  VARIANT (3)..(8): Xaa = Any Amino Acid
  misc_feature (9)..(9): Xaa can be any naturally occurring amino acid
  misc_feature (14)..(14): Xaa can be any naturally occurring amino acid
CCXEYCCXXNPACXTGCY

SEQ ID NO: 1422 - protein, 18 aa, Artificial Sequence
  Synthetically generated peptide
  VARIANT (3)..(8): Xaa = Any Amino Acid
  misc_feature (9)..(9): Xaa can be any naturally occurring amino acid
  misc_feature (15)..(15): Xaa can be any naturally occurring amino acid
CCXEYCCXXNPACTXGCY

SEQ ID NO: 1423 - protein, 12 aa, Artificial Sequence
  Synthetically generated peptide
CELCINVACTGC

SEQ ID NO: 1424 - protein, 12 aa, Artificial Sequence
  Synthetically generated peptide
CELCVNVACTGC

SEQ ID NO: 1425 - protein, 10 aa, Artificial Sequence
  Synthetically generated peptide
CAELCCNPAC

SEQ ID NO: 1426 - protein, 13 aa, Artificial Sequence
  Synthetically generated peptide
CCGLCCNPACAGC

SEQ ID NO: 1427 - protein, 13 aa, Artificial Sequence
  Synthetically generated peptide
CCGLCCYPACAGC

SEQ ID NO: 1428 - protein, 12 aa, Artificial Sequence
  Synthetically generated peptide
CELCCNPACAGC

SEQ ID NO: 1429 - protein, 13 aa, Artificial Sequence
  Synthetically generated peptide
CCDVCCYPACTGC

SEQ ID NO: 1430 - protein, 13 aa, Artificial Sequence
  Synthetically generated peptide
CCELCCNPACAGC

SEQ ID NO: 1431 - protein, 13 aa, Artificial Sequence
  Synthetically generated peptide
CCELCCYPACAGC

SEQ ID NO: 1432 - protein, 13 aa, Artificial Sequence
  Synthetically generated peptide
CCELCCNPACTGC

SEQ ID NO: 1433 - protein, 13 aa, Artificial Sequence
  Synthetically generated peptide
CCELCCYPACTGC

SEQ ID NO: 1434 - protein, 13 aa, Artificial Sequence
  Synthetically generated peptide
CCELCCNPGCTGC

SEQ ID NO: 1435 - protein, 13 aa, Artificial Sequence
  Synthetically generated peptide
CCEACCNPACTGC

SEQ ID NO: 1436 - protein, 13 aa, Artificial Sequence
  Synthetically generated peptide
CCEKCCNPACTGC

SEQ ID NO: 1437 - protein, 13 aa, Artificial Sequence
  Synthetically generated peptide
CCELCCNPACTAC

SEQ ID NO: 1438 - protein, 13 aa, Artificial Sequence
  Synthetically generated peptide
CCPLCCNPACTGC

SEQ ID NO: 1439 - protein, 13 aa, Artificial Sequence
  Synthetically generated peptide
ACELCANPACTGC

SEQ ID NO: 1440 - protein, 13 aa, Artificial Sequence
  Synthetically generated peptide
CCELACNPACTGA

SEQ ID NO: 1441 - protein, 12 aa, Artificial Sequence
  Synthetically generated peptide
CELCANPACTGC

SEQ ID NO: 1442 - protein, 10 aa, Artificial Sequence
  Synthetically generated peptide
CCELACNPAC

SEQ ID NO: 1443 - protein, 13 aa, Artificial Sequence
  Synthetically generated peptide
CCDVCCNPACAGC

SEQ ID NO: 1444 - protein, 13 aa, Artificial Sequence
  Synthetically generated peptide
CCDVCCNPACTGC

SEQ ID NO: 1445 - protein, 14 aa, Artificial Sequence
  Synthetically generated peptide
CCDVCCNPACAGCY

SEQ ID NO: 1446 - protein, 14 aa, Artificial Sequence
  Synthetically generated peptide
CCDVCCNPACTGCY

SEQ ID NO: 1447 - protein, 13 aa, Artificial Sequence
  Synthetically generated peptide
CCELCCYPACAGC

SEQ ID NO: 1448 - protein, 12 aa, Artificial Sequence
  Synthetically generated peptide
CCICCNPACFGC

SEQ ID NO: 1449 - protein, 11 aa, Artificial Sequence
  Synthetically generated peptide
CCNYCCSPCGC

SEQ ID NO: 1450 - protein, 13 aa, Artificial Sequence
  Synthetically generated peptide
CCDVCCNPACAGC

SEQ ID NO: 1451 - protein, 13 aa, Artificial Sequence
  Synthetically generated peptide
CCDACCNPACAGC

SEQ ID NO: 1452 - protein, 13 aa, Artificial Sequence
  Synthetically generated peptide
CCDCCCNPACAGC

SEQ ID NO: 1453 - protein, 13 aa, Artificial Sequence
  Synthetically generated peptide
CCDDCCNPACAGC

SEQ ID NO: 1454 - protein, 13 aa, Artificial Sequence
  Synthetically generated peptide
CCDECCNPACAGC

SEQ ID NO: 1455 - protein, 13 aa, Artificial Sequence
  Synthetically generated peptide
CCDFCCNPACAGC

SEQ ID NO: 1456 - protein, 13 aa, Artificial Sequence
  Synthetically generated peptide
CCDGCCNPACAGC

SEQ ID NO: 1457 - protein, 13 aa, Artificial Sequence
  Synthetically generated peptide
CCDHCCNPACAGC

SEQ ID NO: 1458 - protein, 13 aa, Artificial Sequence
  Synthetically generated peptide
CCDICCNPACAGC

SEQ ID NO: 1459 - protein, 13 aa, Artificial Sequence
  Synthetically generated peptide
CCDKCCNPACAGC

SEQ ID NO: 1460 - protein, 13 aa, Artificial Sequence
  Synthetically generated peptide
CCDLCCNPACAGC

SEQ ID NO: 1461 - protein, 13 aa, Artificial Sequence
  Synthetically generated peptide
CCDMCCNPACAGC

SEQ ID NO: 1462 - protein, 13 aa, Artificial Sequence
  Synthetically generated peptide
CCDNCCNPACAGC

SEQ ID NO: 1463 - protein, 13 aa, Artificial Sequence
  Synthetically generated peptide
CCDPCCNPACAGC

SEQ ID NO: 1464 - protein, 13 aa, Artificial Sequence
  Synthetically generated peptide
CCDQCCNPACAGC

SEQ ID NO: 1465 - protein, 13 aa, Artificial Sequence
  Synthetically generated peptide
CCDRCCNPACAGC

SEQ ID NO: 1466 - protein, 13 aa, Artificial Sequence
  Synthetically generated peptide
CCDSCCNPACAGC

SEQ ID NO: 1467 - protein, 13 aa, Artificial Sequence
  Synthetically generated peptide
CCDTCCNPACAGC

SEQ ID NO: 1468 - protein, 13 aa, Artificial Sequence
  Synthetically generated peptide
CCDWCCNPACAGC

SEQ ID NO: 1469 - protein, 13 aa, Artificial Sequence
  Synthetically generated peptide
CCDYCCNPACAGC

SEQ ID NO: 1470 - protein, 13 aa, Artificial Sequence
  Synthetically generated peptide
CCEICCNPACFGC

SEQ ID NO: 1471 - protein, 13 aa, Artificial Sequence
  Synthetically generated peptide
CCEACCNPACFGC

SEQ ID NO: 1472 - protein, 13 aa, Artificial Sequence
  Synthetically generated peptide
CCECCCNPACFGC

SEQ ID NO: 1473 - protein, 13 aa, Artificial Sequence
  Synthetically generated peptide
CCEDCCNPACFGC

SEQ ID NO: 1474 - protein, 13 aa, Artificial Sequence
  Synthetically generated peptide
CCEECCNPACFGC

SEQ ID NO: 1475 - protein, 13 aa, Artificial Sequence
  Synthetically generated peptide
CCEFCCNPACFGC

SEQ ID NO: 1476 - protein, 13 aa, Artificial Sequence
  Synthetically generated peptide
CCEGCCNPACFGC

SEQ ID NO: 1477 - protein, 13 aa, Artificial Sequence
  Synthetically generated peptide
CCEHCCNPACFGC

SEQ ID NO: 1478 - protein, 13 aa, Artificial Sequence
  Synthetically generated peptide
CCEKCCNPACFGC

SEQ ID NO: 1479 - protein, 13 aa, Artificial Sequence
  Synthetically generated peptide
CCELCCNPACFGC

SEQ ID NO: 1480 - protein, 13 aa, Artificial Sequence
  Synthetically generated peptide
CCEMCCNPACFGC

SEQ ID NO: 1481 - protein, 13 aa, Artificial Sequence
  Synthetically generated peptide
CCENCCNPACFGC

SEQ ID NO: 1482 - protein, 13 aa, Artificial Sequence
  Synthetically generated peptide
CCEPCCNPACFGC

SEQ ID NO: 1483 - protein, 13 aa, Artificial Sequence
  Synthetically generated peptide
CCEQCCNPACFGC

SEQ ID NO: 1484 - protein, 13 aa, Artificial Sequence
  Synthetically generated peptide
CCERCCNPACFGC

SEQ ID NO: 1485 - protein, 13 aa, Artificial Sequence
  Synthetically generated peptide
CCESCCNPACFGC

SEQ ID NO: 1486 - protein, 13 aa, Artificial Sequence
  Synthetically generated peptide
CCETCCNPACFGC

SEQ ID NO: 1487 - protein, 13 aa, Artificial Sequence
  Synthetically generated peptide
CCEVCCNPACFGC

SEQ ID NO: 1488 - protein, 13 aa, Artificial Sequence
  Synthetically generated peptide
CCEWCCNPACFGC

SEQ ID NO: 1489 - protein, 13 aa, Artificial Sequence
  Synthetically generated peptide
CCEYCCNPACFGC

SEQ ID NO: 1490 - protein, 13 aa, Artificial Sequence
  Synthetically generated peptide
CCELCCNPACAPC

SEQ ID NO: 1491 - protein, 13 aa, Artificial Sequence
  Synthetically generated peptide
CCEACCNPACAPC

SEQ ID NO: 1492 - protein, 13 aa, Artificial Sequence
  Synthetically generated peptide
CCECCCNPACAPC

SEQ ID NO: 1493 - protein, 13 aa, Artificial Sequence
  Synthetically generated peptide
CCEDCCNPACAPC

SEQ ID NO: 1494 - protein, 13 aa, Artificial Sequence
  Synthetically generated peptide
CCEECCNPACAPC

SEQ ID NO: 1495 - protein, 13 aa, Artificial Sequence
  Synthetically generated peptide
CCEFCCNPACAPC

SEQ ID NO: 1496 - protein, 13 aa, Artificial Sequence
  Synthetically generated peptide
CCEGCCNPACAPC

SEQ ID NO: 1497 - protein, 13 aa, Artificial Sequence
  Synthetically generated peptide
CCEHCCNPACAPC

SEQ ID NO: 1498 - protein, 13 aa, Artificial Sequence
  Synthetically generated peptide
CCEICCNPACAPC

SEQ ID NO: 1499 - protein, 13 aa, Artificial Sequence
  Synthetically generated peptide
CCEKCCNPACAPC

SEQ ID NO: 1500 - protein, 13 aa, Artificial Sequence
  Synthetically generated peptide
CCEMCCNPACAPC

SEQ ID NO: 1501 - protein, 13 aa, Artificial Sequence
  Synthetically generated peptide
CCENCCNPACAPC

SEQ ID NO: 1502 - protein, 13 aa, Artificial Sequence
  Synthetically generated peptide
CCEPCCNPACAPC

SEQ ID NO: 1503 - protein, 13 aa, Artificial Sequence
  Synthetically generated peptide
CCEQCCNPACAPC

SEQ ID NO: 1504 - protein, 13 aa, Artificial Sequence
  Synthetically generated peptide
CCERCCNPACAPC

SEQ ID NO: 1505 - protein, 13 aa, Artificial Sequence
  Synthetically generated peptide
CCESCCNPACAPC

SEQ ID NO: 1506 - protein, 13 aa, Artificial Sequence
  Synthetically generated peptide
CCETCCNPACAPC

SEQ ID NO: 1507 - protein, 13 aa, Artificial Sequence
  Synthetically generated peptide
CCEVCCNPACAPC

SEQ ID NO: 1508 - protein, 13 aa, Artificial Sequence
  Synthetically generated peptide
CCEWCCNPACAPC

SEQ ID NO: 1509 - protein, 13 aa, Artificial Sequence
  Synthetically generated peptide
CCEYCCNPACAPC

SEQ ID NO: 1510 - protein, 13 aa, Artificial Sequence
  Synthetically generated peptide
CCELCCNPACFGC

SEQ ID NO: 1511 - protein, 13 aa, Artificial Sequence
  Synthetically generated peptide
CCEACCNPACFGC

SEQ ID NO: 1512 - protein, 13 aa, Artificial Sequence
  Synthetically generated peptide
CCECCCNPACFGC

SEQ ID NO: 1513 - protein, 13 aa, Artificial Sequence
  Synthetically generated peptide
CCEDCCNPACFGC

SEQ ID NO: 1514 - protein, 13 aa, Artificial Sequence
  Synthetically generated peptide
CCEECCNPACFGC

SEQ ID NO: 1515 - protein, 13 aa, Artificial Sequence
  Synthetically generated peptide
CCEFCCNPACFGC

SEQ ID NO: 1516 - protein, 13 aa, Artificial Sequence
  Synthetically generated peptide
CCEGCCNPACFGC

SEQ ID NO: 1517 - protein, 13 aa, Artificial Sequence
  Synthetically generated peptide
CCEHCCNPACFGC

SEQ ID NO: 1518 - protein, 13 aa, Artificial Sequence
  Synthetically generated peptide
CCEICCNPACFGC

SEQ ID NO: 1519 - protein, 13 aa, Artificial Sequence
  Synthetically generated peptide
CCEKCCNPACFGC

SEQ ID NO: 1520 - protein, 13 aa, Artificial Sequence
  Synthetically generated peptide
CCEMCCNPACFGC

SEQ ID NO: 1521 - protein, 13 aa, Artificial Sequence
  Synthetically generated peptide
CCENCCNPACFGC

SEQ ID NO: 1522 - protein, 13 aa, Artificial Sequence
  Synthetically generated peptide
CCEPCCNPACFGC

SEQ ID NO: 1523 - protein, 13 aa, Artificial Sequence
  Synthetically generated peptide
CCEQCCNPACFGC

SEQ ID NO: 1524 - protein, 13 aa, Artificial Sequence
  Synthetically generated peptide
CCERCCNPACFGC

SEQ ID NO: 1525 - protein, 13 aa, Artificial Sequence
  Synthetically generated peptide
CCESCCNPACFGC

SEQ ID NO: 1526 - protein, 13 aa, Artificial Sequence
  Synthetically generated peptide
CCETCCNPACFGC

SEQ ID NO: 1527 - protein, 13 aa, Artificial Sequence
  Synthetically generated peptide
CCEVCCNPACFGC

SEQ ID NO: 1528 - protein, 13 aa, Artificial Sequence
  Synthetically generated peptide
CCEWCCNPACFGC

SEQ ID NO: 1529 - protein, 13 aa, Artificial Sequence
  Synthetically generated peptide
CCEYCCNPACFGC

SEQ ID NO: 1530 - protein, 13 aa, Artificial Sequence
  Synthetically generated peptide
CCEVCCNPACAGC

SEQ ID NO: 1531 - protein, 13 aa, Artificial Sequence
  Synthetically generated peptide
CCEACCNPACAGC

SEQ ID NO: 1532 - protein, 13 aa, Artificial Sequence
  Synthetically generated peptide
CCECCCNPACAGC

SEQ ID NO: 1533 - protein, 13 aa, Artificial Sequence
  Synthetically generated peptide
CCEDCCNPACAGC

SEQ ID NO: 1534 - protein, 13 aa, Artificial Sequence
  Synthetically generated peptide
CCEECCNPACAGC

SEQ ID NO: 1535 - protein, 13 aa, Artificial Sequence
  Synthetically generated peptide
CCEFCCNPACAGC

SEQ ID NO: 1536 - protein, 13 aa, Artificial Sequence
  Synthetically generated peptide
CCEGCCNPACAGC

SEQ ID NO: 1537 - protein, 13 aa, Artificial Sequence
  Synthetically generated peptide
CCEHCCNPACAGC

SEQ ID NO: 1538 - protein, 13 aa, Artificial Sequence
  Synthetically generated peptide
CCEICCNPACAGC

SEQ ID NO: 1539 - protein, 13 aa, Artificial Sequence
  Synthetically generated peptide
CCEKCCNPACAGC

SEQ ID NO: 1540 - protein, 13 aa, Artificial Sequence
  Synthetically generated peptide
CCELCCNPACAGC

SEQ ID NO: 1541 - protein, 13 aa, Artificial Sequence
  Synthetically generated peptide
CCEMCCNPACAGC

SEQ ID NO: 1542 - protein, 13 aa, Artificial Sequence
  Synthetically generated peptide
CCENCCNPACAGC

SEQ ID NO: 1543 - protein, 13 aa, Artificial Sequence
  Synthetically generated peptide
CCEPCCNPACAGC

SEQ ID NO: 1544 - protein, 13 aa, Artificial Sequence
  Synthetically generated peptide
CCEQCCNPACAGC

SEQ ID NO: 1545 - protein, 13 aa, Artificial Sequence
  Synthetically generated peptide
CCERCCNPACAGC

SEQ ID NO: 1546 - protein, 13 aa, Artificial Sequence
  Synthetically generated peptide
CCESCCNPACAGC

SEQ ID NO: 1547 - protein, 13 aa, Artificial Sequence
  Synthetically generated peptide
CCETCCNPACAGC

SEQ ID NO: 1548 - protein, 13 aa, Artificial Sequence
  Synthetically generated peptide
CCEWCCNPACAGC

SEQ ID NO: 1549 - protein, 13 aa, Artificial Sequence
  Synthetically generated peptide
CCEYCCNPACAGC

SEQ ID NO: 1550 - protein, 19 aa, Artificial Sequence
  Synthetically generated peptide
NSSNYCCEYCCNPACTGCY

SEQ ID NO: 1551 - protein, 13 aa, Artificial Sequence
  Synthetically generated peptide
  misc_feature (3)..(4): Xaa can be any naturally occurring amino acid
  misc_feature (7)..(7): Xaa can be any naturally occurring amino acid
  misc_feature (11)..(11): Xaa can be any naturally occurring amino acid
CCXXCCXPACXGC

SEQ ID NO: 1552 - protein, 13 aa, Artificial Sequence
  Synthetically generated peptide
  misc_feature (4)..(4): Xaa can be any naturally occurring amino acid
CCIXCCNPACFGC

SEQ ID NO: 1553 - protein, 13 aa, Artificial Sequence
  Synthetically generated peptide
  misc_feature (9)..(9): Xaa can be any naturally occurring amino acid
  misc_feature (11)..(11): Xaa can be any naturally occurring amino acid
CCNYCCSPXCXGC

SEQ ID NO: 1554 - protein, 13 aa, Artificial Sequence
  Synthetically generated peptide
  misc_feature (3)..(4): Xaa can be any naturally occurring amino acid
  misc_feature (7)..(9): Xaa can be any naturally occurring amino acid
  misc_feature (11)..(12): Xaa can be any naturally occurring amino acid
CCXXCCXXXCXXC

SEQ ID NO: 1555 - protein, 28 aa, Artificial Sequence
  Synthetically generated peptide
  misc_feature (2)..(2): Xaa can be any naturally occurring amino acid
  misc_feature (4)..(4): Xaa can be any naturally occurring amino acid
  misc_feature (6)..(6): Xaa can be any naturally occurring amino acid
  misc_feature (8)..(8): Xaa can be any naturally occurring amino acid
  misc_feature (10)..(10): Xaa can be any naturally occurring amino acid
  misc_feature (12)..(12): Xaa can be any naturally occurring amino acid
  misc_feature (14)..(14): Xaa can be any naturally occurring amino acid
  misc_feature (16)..(16): Xaa can be any naturally occurring amino acid
  misc_feature (18)..(18): Xaa can be any naturally occurring amino acid
  misc_feature (20)..(20): Xaa can be any naturally occurring amino acid
  misc_feature (22)..(22): Xaa can be any naturally occurring amino acid
  misc_feature (24)..(24): Xaa can be any naturally occurring amino acid
  misc_feature (26)..(26): Xaa can be any naturally occurring amino acid
  misc_feature (28)..(28): Xaa can be any naturally occurring amino acid
CXCXEXYXCXCXNXPXAXCXTXGXCXYX

SEQ ID NO: 1556 - protein, 13 aa, Artificial Sequence
  Synthetically generated peptide
CCEACCNPACTGC

SEQ ID NO: 1557 - protein, 13 aa, Artificial Sequence
  Synthetically generated peptide
CCERCCNPACTGC

SEQ ID NO: 1558 - protein, 13 aa, Artificial Sequence
  Synthetically generated peptide
CCENCCNPACTGC

SEQ ID NO: 1559 - protein, 13 aa, Artificial Sequence
  Synthetically generated peptide
CCEDCCNPACTGC

SEQ ID NO: 1560 - protein, 13 aa, Artificial Sequence
  Synthetically generated peptide
CCECCCNPACTGC

SEQ ID NO: 1561 - protein, 13 aa, Artificial Sequence
  Synthetically generated peptide
CCEQCCNPACTGC

SEQ ID NO: 1562 - protein, 13 aa, Artificial Sequence
  Synthetically generated peptide
CCEQCCNPACTGC

SEQ ID NO: 1563 - protein, 13 aa, Artificial Sequence
  Synthetically generated peptide
CCEGCCNPACTGC

SEQ ID NO: 1564 - protein, 13 aa, Artificial Sequence
  Synthetically generated peptide
CCEHCCNPACTGC

SEQ ID NO: 1565 - protein, 13 aa, Artificial Sequence
  Synthetically generated peptide
CCEICCNPACTGC

SEQ ID NO: 1566 - protein, 13 aa, Artificial Sequence
  Synthetically generated peptide
CCEKCCNPACTGC

SEQ ID NO: 1567 - protein, 13 aa, Artificial Sequence
  Synthetically generated peptide
CCEMCCNPACTGC

SEQ ID NO: 1568 - protein, 13 aa, Artificial Sequence
  Synthetically generated peptide
CCEFCCNPACTGC

SEQ ID NO: 1569 - protein, 13 aa, Artificial Sequence
  Synthetically generated peptide
CCEPCCNPACTGC

SEQ ID NO: 1570 - protein, 13 aa, Artificial Sequence
  Synthetically generated peptide
CCESCCNPACTGC

SEQ ID NO: 1571 - protein, 13 aa, Artificial Sequence
  Synthetically generated peptide
CCETCCNPACTGC

SEQ ID NO: 1572 - protein, 13 aa, Artificial Sequence
  Synthetically generated peptide
CCEWCCNPACTGC

SEQ ID NO: 1573 - protein, 13 aa, Artificial Sequence
  Synthetically generated peptide
CCEVCCNPACTGC

SEQ ID NO: 1574 - protein, 13 aa, Artificial Sequence
  Synthetically generated peptide
CCEYCCNPACTGC

SEQ ID NO: 1575 - protein, 13 aa, Artificial Sequence
  Synthetically generated peptide
CCELCCNPACTGC

SEQ ID NO: 1576 - protein, 14 aa, Artificial Sequence
  Synthetically generated peptide
CCEACCNPACTGCY

SEQ ID NO: 1577 - protein, 14 aa, Artificial Sequence
  Synthetically generated peptide
CCERCCNPACTGCY

SEQ ID NO: 1578 - protein, 14 aa, Artificial Sequence
  Synthetically generated peptide
CCENCCNPACTGCY

SEQ ID NO: 1579 - protein, 14 aa, Artificial Sequence
  Synthetically generated peptide
CCEDCCNPACTGCY

SEQ ID NO: 1580 - protein, 14 aa, Artificial Sequence
  Synthetically generated peptide
CCECCCNPACTGCY

SEQ ID NO: 1581 - protein, 14 aa, Artificial Sequence
  Synthetically generated peptide
CCEQCCNPACTGCY

SEQ ID NO: 1582 - protein, 14 aa, Artificial Sequence
  Synthetically generated peptide
CCEECCNPACTGCY

SEQ ID NO: 1583 - protein, 14 aa, Artificial Sequence
  Synthetically generated peptide
CCEGCCNPACTGCY

SEQ ID NO: 1584 - protein, 14 aa, Artificial Sequence
  Synthetically generated peptide
CCEHCCNPACTGCY

SEQ ID NO: 1585 - protein, 14 aa, Artificial Sequence
  Synthetically generated peptide
CCEICCNPACTGCY

SEQ ID NO: 1586 - protein, 14 aa, Artificial Sequence
  Synthetically generated peptide
CCEKCCNPACTGCY

SEQ ID NO: 1587 - protein, 14 aa, Artificial Sequence
  Synthetically generated peptide
CCEMCCNPACTGCY

SEQ ID NO: 1588 - protein, 14 aa, Artificial Sequence
  Synthetically generated peptide
CCEFCCNPACTGCY

SEQ ID NO: 1589 - protein, 14 aa, Artificial Sequence
  Synthetically generated peptide
CCEPCCNPACTGCY

SEQ ID NO: 1590 - protein, 14 aa, Artificial Sequence
  Synthetically generated peptide
CCESCCNPACTGCY

SEQ ID NO: 1591 - protein, 14 aa, Artificial Sequence
  Synthetically generated peptide
CCETCCNPACTGCY

SEQ ID NO: 1592 - protein, 14 aa, Artificial Sequence
  Synthetically generated peptide
CCEWCCNPACTGCY

SEQ ID NO: 1593 - protein, 14 aa, Artificial Sequence
  Synthetically generated peptide
CCEVCCNPACTGCY

SEQ ID NO: 1594 - protein, 14 aa, Artificial Sequence
  Synthetically generated peptide
CCELCCNPACTGCY

SEQ ID NO: 1595 - protein, 19 aa, Artificial Sequence
  Synthetically generated peptide
NSSNYCCELCCNPACTGCY

SEQ ID NO: 1596 - protein, 19 aa, Artificial Sequence
  Synthetically generated peptide
NSSNYCCELCCNPACWGCY

SEQ ID NO: 1597 - protein, 14 aa, Artificial Sequence
  Synthetically generated peptide
CCELCCNPACTGCY

SEQ ID NO: 1598 - protein, 14 aa, Artificial Sequence
  Synthetically generated peptide
CCELCCNPACWGCY

SEQ ID NO: 1599 - protein, 15 aa, Artificial Sequence
  Synthetically generated peptide
NCCELCCNPACTGCY

SEQ ID NO: 1600 - protein, 15 aa, Artificial Sequence
  Synthetically generated peptide
NCCELCCNPACWGCY

SEQ ID NO: 1601 - protein, 15 aa, Artificial Sequence
  Synthetically generated peptide
NCCEFCCNPACTGCY

SEQ ID NO: 1602 - protein, 15 aa, Artificial Sequence
  Synthetically generated peptide
NCCEYCCNPACTGCY

SEQ ID NO: 1603 - protein, 15 aa, Artificial Sequence
  Synthetically generated peptide
NCCEWCCNPACTGCY

SEQ ID NO: 1604 - protein, 15 aa, Artificial Sequence
  Synthetically generated peptide
NCCERCCNPACTGCY

SEQ ID NO: 1605 - protein, 15 aa, Artificial Sequence
  Synthetically generated peptide
NCCEKCCNPACTGCY

SEQ ID NO: 1606 - protein, 21 aa, Artificial Sequence
  Synthetically generated peptide
NSSNYCCELCCNPACTGCYDF

SEQ ID NO: 1607 - protein, 21 aa, Artificial Sequence
  Synthetically generated peptide
NSSNYCCELCCNPACWGCYDF

SEQ ID NO: 1608 - protein, 21 aa, Artificial Sequence
  Synthetically generated peptide
NSSNYCCEFCCNPACTGCYDF

SEQ ID NO: 1609 - protein, 21 aa, Artificial Sequence
  Synthetically generated peptide
NSSNYCCEYCCNPACTGCYDF

SEQ ID NO: 1610 - protein, 21 aa, Artificial Sequence
  Synthetically generated peptide
NSSNYCCEWCCNPACTGCYDF

SEQ ID NO: 1611 - protein, 21 aa, Artificial Sequence
  Synthetically generated peptide
NSSNYCCERCCNPACTGCYDF

SEQ ID NO: 1612 - protein, 21 aa, Artificial Sequence
  Synthetically generated peptide
NSSNYCCEKCCNPACTGCYDF

SEQ ID NO: 1613 - protein, 16 aa, Artificial Sequence
  Synthetically generated peptide
CCELCCNPACTGCYDF

SEQ ID NO: 1614 - protein, 16 aa, Artificial Sequence
  Synthetically generated peptide
CCELCCNPACWGCYDF

SEQ ID NO: 1615 - protein, 16 aa, Artificial Sequence
  Synthetically generated peptide
CCEFCCNPACTGCYDF

SEQ ID NO: 1616 - protein, 16 aa, Artificial Sequence
  Synthetically generated peptide
CCEYCCNPACTGCYDF

SEQ ID NO: 1617 - protein, 16 aa, Artificial Sequence
  Synthetically generated peptide
CCEWCCNPACTGCYDF

SEQ ID NO: 1618 - protein, 16 aa, Artificial Sequence
  Synthetically generated peptide
CCERCCNPACTGCYDF

SEQ ID NO: 1619 - protein, 16 aa, Artificial Sequence
  Synthetically generated peptide
CCEKCCNPACTGCYDF

SEQ ID NO: 1620 - protein, 17 aa, Artificial Sequence
  Synthetically generated peptide
NCCELCCNPACTGCYDF

SEQ ID NO: 1621 - protein, 17 aa, Artificial Sequence
  Synthetically generated peptide
NCCELCCNPACWGCYDF

SEQ ID NO: 1622 - protein, 17 aa, Artificial Sequence
  Synthetically generated peptide
NCCEFCCNPACTGCYDF

SEQ ID NO: 1623 - protein, 17 aa, Artificial Sequence
  Synthetically generated peptide
NCCEYCCNPACTGCYDF

SEQ ID NO: 1624 - protein, 17 aa, Artificial Sequence
  Synthetically generated peptide
NCCEWCCNPACTGCYDF

SEQ ID NO: 1625 - protein, 17 aa, Artificial Sequence
  Synthetically generated peptide
NCCERCCNPACTGCYDF

SEQ ID NO: 1626 - protein, 17 aa, Artificial Sequence
  Synthetically generated peptide
NCCEKCCNPACTGCYDF

SEQ ID NO: 1627 - protein, 15 aa, Artificial Sequence
  Synthetically generated peptide
NCCELCCNPACWGCY

SEQ ID NO: 1628 - protein, 15 aa, Artificial Sequence
  Synthetically generated peptide
NCCEFCCNPACTGCY

SEQ ID NO: 1629 - protein, 15 aa, Artificial Sequence
  Synthetically generated peptide
NCCEYCCNPACTGCY

SEQ ID NO: 1630 - protein, 15 aa, Artificial Sequence
  Synthetically generated peptide
NCCEWCCNPACTGCY

SEQ ID NO: 1631 - protein, 15 aa, Artificial Sequence
  Synthetically generated peptide
NCCERCCNPACTGCY

SEQ ID NO: 1632 - protein, 15 aa, Artificial Sequence
  Synthetically generated peptide
NCCEKCCNPACTGCY

SEQ ID NO: 1633 - protein, 21 aa, Artificial Sequence
  Synthetically generated peptide
NSSNYCCELCCNPACTGCYDF

SEQ ID NO: 1634 - protein, 21 aa, Artificial Sequence
  Synthetically generated peptide
NSSNYCCELCCNPACWGCYDF

SEQ ID NO: 1635 - protein, 21 aa, Artificial Sequence
  Synthetically generated peptide
NSSNYCCEFCCNPACTGCYDF

SEQ ID NO: 1636 - protein, 21 aa, Artificial Sequence
  Synthetically generated peptide
NSSNYCCEYCCNPACTGCYDF

SEQ ID NO: 1637 - protein, 21 aa, Artificial Sequence
  Synthetically generated peptide
NSSNYCCEWCCNPACTGCYDF

SEQ ID NO: 1638 - protein, 21 aa, Artificial Sequence
  Synthetically generated peptide
NSSNYCCERCCNPACTGCYDF

SEQ ID NO: 1639 - protein, 21 aa, Artificial Sequence
  Synthetically generated peptide
NSSNYCCEKCCNPACTGCYDF

SEQ ID NO: 1640 - protein, 16 aa, Artificial Sequence
  Synthetically generated peptide
CCELCCNPACTGCYDF

SEQ ID NO: 1641 - protein, 16 aa, Artificial Sequence
  Synthetically generated peptide
CCELCCNPACWGCYDF

SEQ ID NO: 1642 - protein, 16 aa, Artificial Sequence
  Synthetically generated peptide
CCEFCCNPACTGCYDF

SEQ ID NO: 1643 - protein, 16 aa, Artificial Sequence
  Synthetically generated peptide
CCEYCCNPACTGCYDF

SEQ ID NO: 1644 - protein, 16 aa, Artificial Sequence
  Synthetically generated peptide
CCEWCCNPACTGCYDF

SEQ ID NO: 1645 - protein, 16 aa, Artificial Sequence
  Synthetically generated peptide
CCERCCNPACTGCYDF

SEQ ID NO: 1646 - protein, 16 aa, Artificial Sequence
  Synthetically generated peptide
CCEKCCNPACTGCYDF

SEQ ID NO: 1647 - protein, 17 aa, Artificial Sequence
  Synthetically generated peptide
NCCELCCNPACTGCYDF

SEQ ID NO: 1648 - protein, 17 aa, Artificial Sequence
  Synthetically generated peptide
NCCELCCNPACWGCYDF

SEQ ID NO: 1649 - protein, 17 aa, Artificial Sequence
  Synthetically generated peptide
NCCEFCCNPACTGCYDF

SEQ ID NO: 1650 - protein, 17 aa, Artificial Sequence
  Synthetically generated peptide
NCCEYCCNPACTGCYDF

SEQ ID NO: 1651 - protein, 17 aa, Artificial Sequence
  Synthetically generated peptide
NCCEWCCNPACTGCYDF

SEQ ID NO: 1652 - protein, 17 aa, Artificial Sequence
  Synthetically generated peptide
NCCERCCNPACTGCYDF

SEQ ID NO: 1653 - protein, 17 aa, Artificial Sequence
  Synthetically generated peptide
NCCEKCCNPACTGCYDF

SEQ ID NO: 1654 - protein, 19 aa, Artificial Sequence
  Synthetically generated peptide
QSSNYCCEYCCNPACTGCY

SEQ ID NO: 1655 - protein, 19 aa, Artificial Sequence
  Synthetically generated peptide
NTSNYCCEYCCNPACTGCY

SEQ ID NO: 1656 - protein, 19 aa, Artificial Sequence
  Synthetically generated peptide
NLSNYCCEYCCNPACTGCY

SEQ ID NO: 1657 - protein, 19 aa, Artificial Sequence
  Synthetically generated peptide
NISNYCCEYCCNPACTGCY

SEQ ID NO: 1658 - protein, 19 aa, Artificial Sequence
  Synthetically generated peptide
NSSQYCCEYCCNPACTGCY

SEQ ID NO: 1659 - protein, 18 aa, Artificial Sequence
  Synthetically generated peptide
SSNYCCEYCCNPACTGCY

SEQ ID NO: 1660 - protein, 19 aa, Artificial Sequence
  Synthetically generated peptide
QSSQYCCEYCCNPACTGCY

SEQ ID NO: 1661 - protein, 18 aa, Artificial Sequence
  Synthetically generated peptide
SSQYCCEYCCNPACTGCY

SEQ ID NO: 1662 - protein, 19 aa, Artificial Sequence
  Synthetically generated peptide
NSSNYCCEACCNPACTGCY

SEQ ID NO: 1663 - protein, 19 aa, Artificial Sequence
  Synthetically generated peptide
NSSNYCCERCCNPACTGCY

SEQ ID NO: 1664 - protein, 19 aa, Artificial Sequence
  Synthetically generated peptide
NSSNYCCENCCNPACTGCY

SEQ ID NO: 1665 - protein, 19 aa, Artificial Sequence
  Synthetically generated peptide
NSSNYCCEDCCNPACTGCY

SEQ ID NO: 1666 - protein, 19 aa, Artificial Sequence
  Synthetically generated peptide
NSSNYCCECCCNPACTGCY

SEQ ID NO: 1667 - protein, 19 aa, Artificial Sequence
  Synthetically generated peptide
NSSNYCCEQCCNPACTGCY

SEQ ID NO: 1668 - protein, 19 aa, Artificial Sequence
  Synthetically generated peptide
NSSNYCCEECCNPACTGCY

SEQ ID NO: 1669 - protein, 19 aa, Artificial Sequence
  Synthetically generated peptide
NSSNYCCEGCCNPACTGCY

SEQ ID NO: 1670 - protein, 19 aa, Artificial Sequence
  Synthetically generated peptide
NSSNYCCEHCCNPACTGCY

SEQ ID NO: 1671 - protein, 19 aa, Artificial Sequence
  Synthetically generated peptide
NSSNYCCEICCNPACTGCY

SEQ ID NO: 1672 - protein, 19 aa, Artificial Sequence
  Synthetically generated peptide
NSSNYCCEKCCNPACTGCY

SEQ ID NO: 1673 - protein, 19 aa, Artificial Sequence
  Synthetically generated peptide
NSSNYCCEMCCNPACTGCY

SEQ ID NO: 1674 - protein, 19 aa, Artificial Sequence
  Synthetically generated peptide
NSSNYCCEFCCNPACTGCY

SEQ ID NO: 1675 - protein, 19 aa, Artificial Sequence
  Synthetically generated peptide
NSSNYCCEPCCNPACTGCY

SEQ ID NO: 1676 - protein, 19 aa, Artificial Sequence
  Synthetically generated peptide
NSSNYCCESCCNPACTGCY

SEQ ID NO: 1677 - protein, 19 aa, Artificial Sequence
  Synthetically generated peptide
NSSNYCCETCCNPACTGCY

SEQ ID NO: 1678 - protein, 19 aa, Artificial Sequence
  Synthetically generated peptide
NSSNYCCEWCCNPACTGCY

SEQ ID NO: 1679 - protein, 19 aa, Artificial Sequence
  Synthetically generated peptide
NSSNYCCEVCCNPACTGCY

SEQ ID NO: 1680 - protein, 14 aa, Artificial Sequence
  Synthetically generated peptide
CCEACCNPACTGCY

SEQ ID NO: 1681 - protein, 14 aa, Artificial Sequence
  Synthetically generated peptide
CCERCCNPACTGCY

SEQ ID NO: 1682 - protein, 14 aa, Artificial Sequence
  Synthetically generated peptide
CCENCCNPACTGCY

SEQ ID NO: 1683 - protein, 14 aa, Artificial Sequence
  Synthetically generated peptide
CCEDCCNPACTGCY

SEQ ID NO: 1684 - protein, 14 aa, Artificial Sequence
  Synthetically generated peptide
CCECCCNPACTGCY

SEQ ID NO: 1685 - protein, 14 aa, Artificial Sequence
  Synthetically generated peptide
CCEQCCNPACTGCY

SEQ ID NO: 1686 - protein, 14 aa, Artificial Sequence
  Synthetically generated peptide
CCEECCNPACTGCY

SEQ ID NO: 1687 - protein, 14 aa, Artificial Sequence
  Synthetically generated peptide
CCEGCCNPACTGCY

SEQ ID NO: 1688 - protein, 14 aa, Artificial Sequence
  Synthetically generated peptide
CCEHCCNPACTGCY

SEQ ID NO: 1689 - protein, 14 aa, Artificial Sequence
  Synthetically generated peptide
CCEICCNPACTGCY

SEQ ID NO: 1690 - protein, 14 aa, Artificial Sequence
  Synthetically generated peptide
CCEKCCNPACTGCY

SEQ ID NO: 1691 - protein, 14 aa, Artificial Sequence
  Synthetically generated peptide
CCEMCCNPACTGCY

SEQ ID NO: 1692 - protein, 14 aa, Artificial Sequence
  Synthetically generated peptide
CCEFCCNPACTGCY

SEQ ID NO: 1693 - protein, 14 aa, Artificial Sequence
  Synthetically generated peptide
CCEPCCNPACTGCY

SEQ ID NO: 1694 - protein, 14 aa, Artificial Sequence
  Synthetically generated peptide
CCESCCNPACTGCY

SEQ ID NO: 1695 - protein, 14 aa, Artificial Sequence
  Synthetically generated peptide
CCETCCNPACTGCY

SEQ ID NO: 1696 - protein, 14 aa, Artificial Sequence
  Synthetically generated peptide
CCEWCCNPACTGCY

SEQ ID NO: 1697 - protein, 14 aa, Artificial Sequence
  Synthetically generated peptide
CCEVCCNPACTGCY

SEQ ID NO: 1698 - protein, 14 aa, Artificial Sequence
  Synthetically generated peptide
CCELCCNPACWGCY

SEQ ID NO: 1699 - protein, 13 aa, Artificial Sequence
  Synthetically generated peptide
CCEACCNPACTGC

SEQ ID NO: 1700 - protein, 13 aa, Artificial Sequence
  Synthetically generated peptide
CCERCCNPACTGC

SEQ ID NO: 1701 - protein, 13 aa, Artificial Sequence
  Synthetically generated peptide
CCENCCNPACTGC

SEQ ID NO: 1702 - protein, 13 aa, Artificial Sequence
  Synthetically generated peptide
CCEDCCNPACTGC

SEQ ID NO: 1703 - protein, 13 aa, Artificial Sequence
  Synthetically generated peptide
CCECCCNPACTGC

SEQ ID NO: 1704 - protein, 13 aa, Artificial Sequence
  Synthetically generated peptide
CCEQCCNPACTGC

SEQ ID NO: 1705 - protein, 13 aa, Artificial Sequence
  Synthetically generated peptide
CCEECCNPACTGC

SEQ ID NO: 1706 - protein, 13 aa, Artificial Sequence
  Synthetically generated peptide
CCEGCCNPACTGC

SEQ ID NO: 1707 - protein, 13 aa, Artificial Sequence
  Synthetically generated peptide
CCEHCCNPACTGC

SEQ ID NO: 1708 - protein, 13 aa, Artificial Sequence
  Synthetically generated peptide
CCEICCNPACTGC

SEQ ID NO: 1709 - protein, 13 aa, Artificial Sequence
  Synthetically generated peptide
CCEKCCNPACTGC

SEQ ID NO: 1710 - protein, 13 aa, Artificial Sequence
  Synthetically generated peptide
CCEMCCNPACTGC

SEQ ID NO: 1711 - protein, 13 aa, Artificial Sequence
  Synthetically generated peptide
CCEFCCNPACTGC

SEQ ID NO: 1712 - protein, 13 aa, Artificial Sequence
  Synthetically generated peptide
CCEPCCNPACTGC

SEQ ID NO: 1713 - protein, 13 aa, Artificial Sequence
  Synthetically generated peptide
CCESCCNPACTGC

SEQ ID NO: 1714 - protein, 13 aa, Artificial Sequence
  Synthetically generated peptide
CCETCCNPACTGC

SEQ ID NO: 1715 - protein, 13 aa, Artificial Sequence
  Synthetically generated peptide
CCEWCCNPACTGC

SEQ ID NO: 1716 - protein, 13 aa, Artificial Sequence
  Synthetically generated peptide
CCEVCCNPACTGC

SEQ ID NO: 1717 - protein, 54 aa, Artificial Sequence
  Synthetically generated peptide
MKKSILFIFLSVLSFSPFAQDAKPAGSSKEKITLESKKCNIVKKSNKSGPESMN

SEQ ID NO: 1718 - protein, 19 aa, Artificial Sequence
  Synthetically generated peptide
NSSNYCCELCCNPACWGCY

SEQ ID NO: 1719 - protein, 18 aa, Escherichia coli
NTFYCCELCCYPACAGCN

SEQ ID NO: 1720 - protein, 18 aa, Citrobacter freundii
NTFYCCELCCNPACAGCY

SEQ ID NO: 1721 - protein, 30 aa, Yersinia enterocolitica; identical to SEQ ID NO: 27

SEQ ID NO: 1722 - protein, 30 aa, Yersinia enterocolitica
QACDPPLPPAEVSSDWDCCDVCCNPACAGC

SEQ ID NO: 1723 - protein, 30 aa, Yersinia enterocolitica; identical to SEQ ID NO: 29

SEQ ID NO: 1724 - protein, 53 aa, Yersinia enterocolitica; identical to SEQ ID NO: 30

SEQ ID NO: 1725 - protein, 16 aa, Yersinia kristensenii
SDWCCEVCCNPACAGC

SEQ ID NO: 1726 - protein, 17 aa, Vibrio cholerae
IDCCEICCNPACFGCLN

SEQ ID NO: 1727 - protein, 17 aa, Vibrio mimicus
IDCCEICCNPACFGCLN

SEQ ID NO: 1728 - protein, 18 aa, Escherichia coli
NTFYCCELCCNPACAPCY

SEQ ID NO: 1729 - protein, 13 aa, Vibrio cholerae
IDCCEICCNPACF

SEQ ID NO: 1730 - protein, 14 aa, Vibrio cholerae
IDCCEICCNPACFG

SEQ ID NO: 1731 - protein, 17 aa, Vibrio mimicus
IDCCEICCNPACFGCLN

SEQ ID NO: 1732 - protein, 17 aa, Vibrio mimicus
IDRCEICCNPACFGCLN

SEQ ID NO: 1733 - protein, 16 aa, Yersinia enterocolitica
DWDCCDVCCNPACAGC

SEQ ID NO: 1734 - protein, 16 aa, Yersinia enterocolitica
DWDCCDVCCNPACAGC

SEQ ID NO: 1735 - protein, 17 aa, Yersinia enterocolitica
NDDWCCEVCCNPACAGC

SEQ ID NO: 1736 - protein, 16 aa, Yersinia enterocolitica
WDWCCELCCNPACFGC

SEQ ID NO: 1737 - protein, 30 aa, Yersinia enterocolitica; identical to SEQ ID NO: 49

SEQ ID NO: 1738 - protein, 72 aa, Escherichia coli; identical to SEQ ID NO: 53

SEQ ID NO: 1739 - protein, 72 aa, Escherichia coli; identical to SEQ ID NO: 54

SEQ ID NO: 1740 - protein, 71 aa, Yersinia enterocolitica; identical to SEQ ID NO: 55

SEQ ID NO: 1741 - protein, 53 aa, Artificial Sequence
  Synthetically generated peptide
MKKSILFIFLSVLSFSPFAQDAKPAGSSKEKITLESKKCNIVKKSNKSGPESM

SEQ ID NO: 1742 - protein, 53 aa, Escherichia coli
MKKSILFIFLSVLSFSPFAQDAKPAGSSKEKITLESKKCNIVKKNNESSPESM

SEQ ID NO: 1743 - protein, 5 aa, Artificial Sequence
  Synthetically generated peptide
NSSNY

SEQ ID NO: 1744 - protein, 6 aa, Artificial Sequence
  Synthetically generated peptide
KKKKKK

SEQ ID NO: 1745 - protein, 7 aa, Artificial Sequence
  Synthetically generated peptide
DKKKKKK

SEQ ID NO: 1746 - protein, 21 aa, Artificial Sequence
  Synthetically generated peptide
  VARIANT (1)..(4): Xaa = any amino acid or is missing
  misc_feature (5)..(5): Xaa can be any naturally occurring amino acid
  VARIANT (8)..(8): Xaa = Glu or Asp
  VARIANT (9)..(9): Xaa = Leu, Ile, Val, Trp, Tyr or Phe
  VARIANT (16)..(16): Xaa =  Thr, Ala, or Trp
  VARIANT (19)..(19): Xaa = Trp, Tyr, Phe or Leu
  VARIANT (20)..(21): Xaa = Asp, Phe
XXXXXCCXXCCNPACXGCXXX

SEQ ID NO: 1747 - protein, 13 aa, Artificial Sequence
  Synthetically generated peptide
CCYCCNPACTGCY

SEQ ID NO: 1748 - protein, 12 aa, Artificial Sequence
  Synthetically generated peptide
CCCCNPACTGCY

SEQ ID NO: 1749 - protein, 11 aa, Artificial Sequence
  Synthetically generated peptide
CCCCPACTGCY

SEQ ID NO: 1750 - protein, 10 aa, Artificial Sequence
  Synthetically generated peptide
CCCCACTGCY

SEQ ID NO: 1751 - protein, 10 aa, Artificial Sequence
  Synthetically generated peptide
CCCCPCTGCY

SEQ ID NO: 1752 - protein, 10 aa, Artificial Sequence
  Synthetically generated peptide
CCCCPACGCY

SEQ ID NO: 1753 - protein, 10 aa, Artificial Sequence
  Synthetically generated peptide
CCCCPACTCY

SEQ ID NO: 1754 - protein, 10 aa, Artificial Sequence
  Synthetically generated peptide
CCCCPACTGC

SEQ ID NO: 1755 - protein, 11 aa, Artificial Sequence
  Synthetically generated peptide
CCCCNACTGCY

SEQ ID NO: 1756 - protein, 10 aa, Artificial Sequence
  Synthetically generated peptide
CCCCNCTGCY

SEQ ID NO: 1757 - protein, 10 aa, Artificial Sequence
  Synthetically generated peptide
CCCCNACGCY

SEQ ID NO: 1758 - protein, 10 aa, Artificial Sequence
  Synthetically generated peptide
CCCCNACTCY

SEQ ID NO: 1759 - protein, 10 aa, Artificial Sequence
  Synthetically generated peptide
CCCCNACTGC

SEQ ID NO: 1760 - protein, 11 aa, Artificial Sequence
  Synthetically generated peptide
CCCCNPCTGCY

SEQ ID NO: 1761 - protein, 10 aa, Artificial Sequence
  Synthetically generated peptide
CCCCNPCGCY

SEQ ID NO: 1762 - protein, 10 aa, Artificial Sequence
  Synthetically generated peptide
CCCCNPCTCY

SEQ ID NO: 1763 - protein, 10 aa, Artificial Sequence
  Synthetically generated peptide
CCCCNPCTGC

SEQ ID NO: 1764 - protein, 11 aa, Artificial Sequence
  Synthetically generated peptide
CCCCNPACGCY

SEQ ID NO: 1765 - protein, 10 aa, Artificial Sequence
  Synthetically generated peptide
CCCCNPACCY

SEQ ID NO: 1766 - protein, 10 aa, Artificial Sequence
  Synthetically generated peptide
CCCCNPACGC

SEQ ID NO: 1767 - protein, 11 aa, Artificial Sequence
  Synthetically generated peptide
CCCCNPACTCY

SEQ ID NO: 1768 - protein, 10 aa, Artificial Sequence
  Synthetically generated peptide
CCCCNPACTC

SEQ ID NO: 1769 - protein, 11 aa, Artificial Sequence
  Synthetically generated peptide
CCCCNPACTGC

SEQ ID NO: 1770 - protein, 12 aa, Artificial Sequence
  Synthetically generated peptide
CCYCCPACTGCY

SEQ ID NO: 1771 - protein, 11 aa, Artificial Sequence
  Synthetically generated peptide
CCYCCACTGCY

SEQ ID NO: 1772 - protein, 10 aa, Artificial Sequence
  Synthetically generated peptide
CCYCCCTGCY

SEQ ID NO: 1773 - protein, 10 aa, Artificial Sequence
  Synthetically generated peptide
CCYCCACGCY

SEQ ID NO: 1774 - protein, 10 aa, Artificial Sequence
  Synthetically generated peptide
CCYCCACTCY

SEQ ID NO: 1775 - protein, 10 aa, Artificial Sequence
  Synthetically generated peptide
CCYCCACTGC

SEQ ID NO: 1776 - protein, 11 aa, Artificial Sequence
  Synthetically generated peptide
CCYCCPCTGCY

SEQ ID NO: 1777 - protein, 10 aa, Artificial Sequence
  Synthetically generated peptide
CCYCCPCGCY

SEQ ID NO: 1778 - protein, 10 aa, Artificial Sequence
  Synthetically generated peptide
CCYCCPCTCY

SEQ ID NO: 1779 - protein, 10 aa, Artificial Sequence
  Synthetically generated peptide
CCYCCPCTGC

SEQ ID NO: 1780 - protein, 11 aa, Artificial Sequence
  Synthetically generated peptide
CCYCCPACGCY

SEQ ID NO: 1781 - protein, 10 aa, Artificial Sequence
  Synthetically generated peptide
CCYCCPACCY

SEQ ID NO: 1782 - protein, 10 aa, Artificial Sequence
  Synthetically generated peptide
CCYCCPACGC

SEQ ID NO: 1783 - protein, 11 aa, Artificial Sequence
  Synthetically generated peptide
CCYCCPACTCY

SEQ ID NO: 1784 - protein, 10 aa, Artificial Sequence
  Synthetically generated peptide
CCYCCPACTC

SEQ ID NO: 1785 - protein, 11 aa, Artificial Sequence
  Synthetically generated peptide
CCYCCPACTGC

SEQ ID NO: 1786 - protein, 12 aa, Artificial Sequence
  Synthetically generated peptide
CCYCCNACTGCY

SEQ ID NO: 1787 - protein, 11 aa, Artificial Sequence
  Synthetically generated peptide
CCYCCNCTGCY

SEQ ID NO: 1788 - protein, 10 aa, Artificial Sequence
  Synthetically generated peptide
CCYCCNCGCY

SEQ ID NO: 1789 - protein, 10 aa, Artificial Sequence
  Synthetically generated peptide
CCYCCNCTCY

SEQ ID NO: 1790 - protein, 10 aa, Artificial Sequence
  Synthetically generated peptide
CCYCCNCTGC

SEQ ID NO: 1791 - protein, 11 aa, Artificial Sequence
  Synthetically generated peptide
CCYCCNACGCY

SEQ ID NO: 1792 - protein, 10 aa, Artificial Sequence
  Synthetically generated peptide
CCYCCNACCY

SEQ ID NO: 1793 - protein, 10 aa, Artificial Sequence
  Synthetically generated peptide
CCYCCNACGC

SEQ ID NO: 1794 - protein, 11 aa, Artificial Sequence
  Synthetically generated peptide
CCYCCNACTCY

SEQ ID NO: 1795 - protein, 10 aa, Artificial Sequence
  Synthetically generated peptide
CCYCCNACTC

SEQ ID NO: 1796 - protein, 11 aa, Artificial Sequence
  Synthetically generated peptide
CCYCCNACTGC

SEQ ID NO: 1797 - protein, 12 aa, Artificial Sequence
  Synthetically generated peptide
CCYCCNPCTGCY

SEQ ID NO: 1798 - protein, 11 aa, Artificial Sequence
  Synthetically generated peptide
CCYCCNPCGCY

SEQ ID NO: 1799 - protein, 10 aa, Artificial Sequence
  Synthetically generated peptide
CCYCCNPCCY

SEQ ID NO: 1800 - protein, 10 aa, Artificial Sequence
  Synthetically generated peptide
CCYCCNPCGC

SEQ ID NO: 1801 - protein, 11 aa, Artificial Sequence
  Synthetically generated peptide
CCYCCNPCTCY

SEQ ID NO: 1802 - protein, 10 aa, Artificial Sequence
  Synthetically generated peptide
CCYCCNPCTC

SEQ ID NO: 1803 - protein, 11 aa, Artificial Sequence
  Synthetically generated peptide
CCYCCNPCTGC

SEQ ID NO: 1804 - protein, 12 aa, Artificial Sequence
  Synthetically generated peptide
CCYCCNPACGCY

SEQ ID NO: 1805 - protein, 11 aa, Artificial Sequence
  Synthetically generated peptide
CCYCCNPACCY

SEQ ID NO: 1806 - protein, 10 aa, Artificial Sequence
  Synthetically generated peptide
CCYCCNPACC

SEQ ID NO: 1807 - protein, 11 aa, Artificial Sequence
  Synthetically generated peptide
CCYCCNPACGC

SEQ ID NO: 1808 - protein, 12 aa, Artificial Sequence
  Synthetically generated peptide
CCYCCNPACTCY

SEQ ID NO: 1809 - protein, 11 aa, Artificial Sequence
  Synthetically generated peptide
CCYCCNPACTC

SEQ ID NO: 1810 - protein, 12 aa, Artificial Sequence
  Synthetically generated peptide
CCYCCNPACTGC

SEQ ID NO: 1811 - protein, 13 aa, Artificial Sequence
  Synthetically generated peptide
CCECCNPACTGCY

SEQ ID NO: 1812 - protein, 12 aa, Artificial Sequence
  Synthetically generated peptide
CCECCPACTGCY

SEQ ID NO: 1813 - protein, 11 aa, Artificial Sequence
  Synthetically generated peptide
CCECCACTGCY

SEQ ID NO: 1814 - protein, 10 aa, Artificial Sequence
  Synthetically generated peptide
CCECCCTGCY

SEQ ID NO: 1815 - protein, 10 aa, Artificial Sequence
  Synthetically generated peptide
CCECCACGCY

SEQ ID NO: 1816 - protein, 10 aa, Artificial Sequence
  Synthetically generated peptide
CCECCACTCY

SEQ ID NO: 1817 - protein, 10 aa, Artificial Sequence
  Synthetically generated peptide
CCECCACTGC

SEQ ID NO: 1818 - protein, 11 aa, Artificial Sequence
  Synthetically generated peptide
CCECCPCTGCY

SEQ ID NO: 1819 - protein, 10 aa, Artificial Sequence
  Synthetically generated peptide
CCECCPCGCY

SEQ ID NO: 1820 - protein, 10 aa, Artificial Sequence
  Synthetically generated peptide
CCECCPCTCY

SEQ ID NO: 1821 - protein, 10 aa, Artificial Sequence
  Synthetically generated peptide
CCECCPCTGC

SEQ ID NO: 1822 - protein, 11 aa, Artificial Sequence
  Synthetically generated peptide
CCECCPACGCY

SEQ ID NO: 1823 - protein, 10 aa, Artificial Sequence
  Synthetically generated peptide
CCECCPACCY

SEQ ID NO: 1824 - protein, 10 aa, Artificial Sequence
  Synthetically generated peptide
CCECCPACGC

SEQ ID NO: 1825 - protein, 11 aa, Artificial Sequence
  Synthetically generated peptide
CCECCPACTCY

SEQ ID NO: 1826 - protein, 10 aa, Artificial Sequence
  Synthetically generated peptide
CCECCPACTC

SEQ ID NO: 1827 - protein, 11 aa, Artificial Sequence
  Synthetically generated peptide
CCECCPACTGC

SEQ ID NO: 1828 - protein, 12 aa, Artificial Sequence
  Synthetically generated peptide
CCECCNACTGCY

SEQ ID NO: 1829 - protein, 11 aa, Artificial Sequence
  Synthetically generated peptide
CCECCNCTGCY

SEQ ID NO: 1830 - protein, 10 aa, Artificial Sequence
  Synthetically generated peptide
CCECCNCGCY

SEQ ID NO: 1831 - protein, 10 aa, Artificial Sequence
  Synthetically generated peptide
CCECCNCTCY

SEQ ID NO: 1832 - protein, 10 aa, Artificial Sequence
  Synthetically generated peptide
CCECCNCTGC

SEQ ID NO: 1833 - protein, 11 aa, Artificial Sequence
  Synthetically generated peptide
CCECCNACGCY

SEQ ID NO: 1834 - protein, 10 aa, Artificial Sequence
  Synthetically generated peptide
CCECCNACCY

SEQ ID NO: 1835 - protein, 10 aa, Artificial Sequence
  Synthetically generated peptide
CCECCNACGC

SEQ ID NO: 1836 - protein, 11 aa, Artificial Sequence
  Synthetically generated peptide
CCECCNACTCY

SEQ ID NO: 1837 - protein, 10 aa, Artificial Sequence
  Synthetically generated peptide
CCECCNACTC

SEQ ID NO: 1838 - protein, 11 aa, Artificial Sequence
  Synthetically generated peptide
CCECCNACTGC

SEQ ID NO: 1839 - protein, 12 aa, Artificial Sequence
  Synthetically generated peptide
CCECCNPCTGCY

SEQ ID NO: 1840 - protein, 11 aa, Artificial Sequence
  Synthetically generated peptide
CCECCNPCGCY

SEQ ID NO: 1841 - protein, 10 aa, Artificial Sequence
  Synthetically generated peptide
CCECCNPCCY

SEQ ID NO: 1842 - protein, 10 aa, Artificial Sequence
  Synthetically generated peptide
CCECCNPCGC

SEQ ID NO: 1843 - protein, 11 aa, Artificial Sequence
  Synthetically generated peptide
CCECCNPCTCY

SEQ ID NO: 1844 - protein, 10 aa, Artificial Sequence
  Synthetically generated peptide
CCECCNPCTC

SEQ ID NO: 1845 - protein, 11 aa, Artificial Sequence
  Synthetically generated peptide
CCECCNPCTGC

SEQ ID NO: 1846 - protein, 12 aa, Artificial Sequence
  Synthetically generated peptide
CCECCNPACGCY

SEQ ID NO: 1847 - protein, 11 aa, Artificial Sequence
  Synthetically generated peptide
CCECCNPACCY

SEQ ID NO: 1848 - protein, 10 aa, Artificial Sequence
  Synthetically generated peptide
CCECCNPACC

SEQ ID NO: 1849 - protein, 11 aa, Artificial Sequence
  Synthetically generated peptide
CCECCNPACGC

SEQ ID NO: 1850 - protein, 12 aa, Artificial Sequence
  Synthetically generated peptide
CCECCNPACTCY

SEQ ID NO: 1851 - protein, 11 aa, Artificial Sequence
  Synthetically generated peptide
CCECCNPACTC

SEQ ID NO: 1852 - protein, 12 aa, Artificial Sequence
  Synthetically generated peptide
CCECCNPACTGC

SEQ ID NO: 1853 - protein, 13 aa, Artificial Sequence
  Synthetically generated peptide
CCEYCCPACTGCY

SEQ ID NO: 1854 - protein, 12 aa, Artificial Sequence
  Synthetically generated peptide
CCEYCCACTGCY

SEQ ID NO: 1855 - protein, 11 aa, Artificial Sequence
  Synthetically generated peptide
CCEYCCCTGCY

SEQ ID NO: 1856 - protein, 10 aa, Artificial Sequence
  Synthetically generated peptide
CCEYCCCGCY

SEQ ID NO: 1857 - protein, 10 aa, Artificial Sequence
  Synthetically generated peptide
CCEYCCCTCY

SEQ ID NO: 1858 - protein, 10 aa, Artificial Sequence
  Synthetically generated peptide
CCEYCCCTGC

SEQ ID NO: 1859 - protein, 11 aa, Artificial Sequence
  Synthetically generated peptide
CCEYCCACGCY

SEQ ID NO: 1860 - protein, 10 aa, Artificial Sequence
  Synthetically generated peptide
CCEYCCACCY

SEQ ID NO: 1861 - protein, 10 aa, Artificial Sequence
  Synthetically generated peptide
CCEYCCACGC

SEQ ID NO: 1862 - protein, 11 aa, Artificial Sequence
  Synthetically generated peptide
CCEYCCACTCY

SEQ ID NO: 1863 - protein, 10 aa, Artificial Sequence
  Synthetically generated peptide
CCEYCCACTC

SEQ ID NO: 1864 - protein, 11 aa, Artificial Sequence
  Synthetically generated peptide
CCEYCCACTGC

SEQ ID NO: 1865 - protein, 12 aa, Artificial Sequence
  Synthetically generated peptide
CCEYCCPCTGCY

SEQ ID NO: 1866 - protein, 11 aa, Artificial Sequence
  Synthetically generated peptide
CCEYCCPCGCY

SEQ ID NO: 1867 - protein, 10 aa, Artificial Sequence
  Synthetically generated peptide
CCEYCCPCCY

SEQ ID NO: 1868 - protein, 10 aa, Artificial Sequence
  Synthetically generated peptide
CCEYCCPCGC

SEQ ID NO: 1869 - protein, 11 aa, Artificial Sequence
  Synthetically generated peptide
CCEYCCPCTCY

SEQ ID NO: 1870 - protein, 10 aa, Artificial Sequence
  Synthetically generated peptide
CCEYCCPCTC

SEQ ID NO: 1871 - protein, 11 aa, Artificial Sequence
  Synthetically generated peptide
CCEYCCPCTGC

SEQ ID NO: 1872 - protein, 12 aa, Artificial Sequence
  Synthetically generated peptide
CCEYCCPACGCY

SEQ ID NO: 1873 - protein, 11 aa, Artificial Sequence
  Synthetically generated peptide
CCEYCCPACCY

SEQ ID NO: 1874 - protein, 10 aa, Artificial Sequence
  Synthetically generated peptide
CCEYCCPACC

SEQ ID NO: 1875 - protein, 11 aa, Artificial Sequence
  Synthetically generated peptide
CCEYCCPACGC

SEQ ID NO: 1876 - protein, 12 aa, Artificial Sequence
  Synthetically generated peptide
CCEYCCPACTCY

SEQ ID NO: 1877 - protein, 11 aa, Artificial Sequence
  Synthetically generated peptide
CCEYCCPACTC

SEQ ID NO: 1878 - protein, 12 aa, Artificial Sequence
  Synthetically generated peptide
CCEYCCPACTGC

SEQ ID NO: 1879 - protein, 13 aa, Artificial Sequence
  Synthetically generated peptide
CCEYCCNACTGCY

SEQ ID NO: 1880 - protein, 12 aa, Artificial Sequence
  Synthetically generated peptide
CCEYCCNCTGCY

SEQ ID NO: 1881 - protein, 11 aa, Artificial Sequence
  Synthetically generated peptide
CCEYCCNCGCY

SEQ ID NO: 1882 - protein, 10 aa, Artificial Sequence
  Synthetically generated peptide
CCEYCCNCCY

SEQ ID NO: 1883 - protein, 10 aa, Artificial Sequence
  Synthetically generated peptide
CCEYCCNCGC

SEQ ID NO: 1884 - protein, 11 aa, Artificial Sequence
  Synthetically generated peptide
CCEYCCNCTCY

SEQ ID NO: 1885 - protein, 10 aa, Artificial Sequence
  Synthetically generated peptide
CCEYCCNCTC

SEQ ID NO: 1886 - protein, 11 aa, Artificial Sequence
  Synthetically generated peptide
CCEYCCNCTGC

SEQ ID NO: 1887 - protein, 12 aa, Artificial Sequence
  Synthetically generated peptide
CCEYCCNACGCY

SEQ ID NO: 1888 - protein, 11 aa, Artificial Sequence
  Synthetically generated peptide
CCEYCCNACCY

SEQ ID NO: 1889 - protein, 10 aa, Artificial Sequence
  Synthetically generated peptide
CCEYCCNACC

SEQ ID NO: 1890 - protein, 11 aa, Artificial Sequence
  Synthetically generated peptide
CCEYCCNACGC

SEQ ID NO: 1891 - protein, 12 aa, Artificial Sequence
  Synthetically generated peptide
CCEYCCNACTCY

SEQ ID NO: 1892 - protein, 11 aa, Artificial Sequence
  Synthetically generated peptide
CCEYCCNACTC

SEQ ID NO: 1893 - protein, 12 aa, Artificial Sequence
  Synthetically generated peptide
CCEYCCNACTGC

SEQ ID NO: 1894 - protein, 13 aa, Artificial Sequence
  Synthetically generated peptide
CCEYCCNPCTGCY

SEQ ID NO: 1895 - protein, 12 aa, Artificial Sequence
  Synthetically generated peptide
CCEYCCNPCGCY

SEQ ID NO: 1896 - protein, 11 aa, Artificial Sequence
  Synthetically generated peptide
CCEYCCNPCCY

SEQ ID NO: 1897 - protein, 10 aa, Artificial Sequence
  Synthetically generated peptide
CCEYCCNPCC

SEQ ID NO: 1898 - protein, 11 aa, Artificial Sequence
  Synthetically generated peptide
CCEYCCNPCGC

SEQ ID NO: 1899 - protein, 12 aa, Artificial Sequence
  Synthetically generated peptide
CCEYCCNPCTCY

SEQ ID NO: 1900 - protein, 11 aa, Artificial Sequence
  Synthetically generated peptide
CCEYCCNPCTC

SEQ ID NO: 1901 - protein, 12 aa, Artificial Sequence
  Synthetically generated peptide
CCEYCCNPCTGC

SEQ ID NO: 1902 - protein, 13 aa, Artificial Sequence
  Synthetically generated peptide
CCEYCCNPACGCY

SEQ ID NO: 1903 - protein, 12 aa, Artificial Sequence
  Synthetically generated peptide
CCEYCCNPACCY

SEQ ID NO: 1904 - protein, 11 aa, Artificial Sequence
  Synthetically generated peptide
CCEYCCNPACC

SEQ ID NO: 1905 - protein, 12 aa, Artificial Sequence
  Synthetically generated peptide
CCEYCCNPACGC

SEQ ID NO: 1906 - protein, 13 aa, Artificial Sequence
  Synthetically generated peptide
CCEYCCNPACTCY

SEQ ID NO: 1907 - protein, 12 aa, Artificial Sequence
  Synthetically generated peptide
CCEYCCNPACTC

SEQ ID NO: 1908 - protein, 13 aa, Artificial Sequence
  Synthetically generated peptide
CCEYCCNPACTGC

SEQ ID NO: 1909 - protein, 13 aa, Artificial Sequence
  Synthetically generated peptide
  VARIANT (1)..(1): Xaa = Any Amino Acid
XEYCCNPACTGCY

SEQ ID NO: 1910 - protein, 16 aa, Artificial Sequence
  Synthetically generated peptide
  VARIANT (3)..(4): Xaa = Any Amino Acid
CCXXEYCCNPACTGCY

SEQ ID NO: 1911 - protein, 17 aa, Artificial Sequence
  Synthetically generated peptide
  VARIANT (3)..(4): Xaa = Any Amino Acid
  misc_feature (5)..(5): Xaa can be any naturally occurring amino acid
CCXXXEYCCNPACTGCY

SEQ ID NO: 1912 - protein, 18 aa, Artificial Sequence
  Synthetically generated peptide
  VARIANT (3)..(4): Xaa = Any Amino Acid
  misc_feature (5)..(6): Xaa can be any naturally occurring amino acid
CCXXXXEYCCNPACTGCY

SEQ ID NO: 1913 - protein, 18 aa, Artificial Sequence
  Synthetically generated peptide
  VARIANT (3)..(4): Xaa = Any Amino Acid
  misc_feature (5)..(5): Xaa can be any naturally occurring amino acid
  misc_feature (7)..(7): Xaa can be any naturally occurring amino acid
CCXXXEXYCCNPACTGCY

SEQ ID NO: 1914 - protein, 18 aa, Artificial Sequence
  Synthetically generated peptide
  VARIANT (3)..(4): Xaa = Any Amino Acid
  misc_feature (5)..(5): Xaa can be any naturally occurring amino acid
  misc_feature (8)..(8): Xaa can be any naturally occurring amino acid
CCXXXEYXCCNPACTGCY

SEQ ID NO: 1915 - protein, 18 aa, Artificial Sequence
  Synthetically generated peptide
  VARIANT (3)..(4): Xaa = Any Amino Acid
  misc_feature (5)..(5): Xaa can be any naturally occurring amino acid
  misc_feature (10)..(10): Xaa can be any naturally occurring amino acid
CCXXXEYCCXNPACTGCY

SEQ ID NO: 1916 - protein, 18 aa, Artificial Sequence
  Synthetically generated peptide
  VARIANT (3)..(4): Xaa = Any Amino Acid
  misc_feature (5)..(5): Xaa can be any naturally occurring amino acid
  misc_feature (11)..(11): Xaa can be any naturally occurring amino acid
CCXXXEYCCNXPACTGCY

SEQ ID NO: 1917 - protein, 18 aa, Artificial Sequence
  Synthetically generated peptide
  VARIANT (3)..(4): Xaa = Any Amino Acid
  misc_feature (5)..(5): Xaa can be any naturally occurring amino acid
  misc_feature (12)..(12): Xaa can be any naturally occurring amino acid
CCXXXEYCCNPXACTGCY

SEQ ID NO: 1918 - protein, 18 aa, Artificial Sequence
  Synthetically generated peptide
  VARIANT (3)..(4): Xaa = Any Amino Acid
  misc_feature (5)..(5): Xaa can be any naturally occurring amino acid
  misc_feature (13)..(13): Xaa can be any naturally occurring amino acid
CCXXXEYCCNPAXCTGCY

SEQ ID NO: 1919 - protein, 18 aa, Artificial Sequence
  Synthetically generated peptide
  VARIANT (3)..(4): Xaa = Any Amino Acid
  misc_feature (5)..(5): Xaa can be any naturally occurring amino acid
  misc_feature (14)..(14): Xaa can be any naturally occurring amino acid
CCXXXEYCCNPACXTGCY

SEQ ID NO: 1920 - protein, 18 aa, Artificial Sequence
  Synthetically generated peptide
  VARIANT (3)..(4): Xaa = Any Amino Acid
  misc_feature (5)..(5): Xaa can be any naturally occurring amino acid
  misc_feature (15)..(15): Xaa can be any naturally occurring amino acid
CCXXXEYCCNPACTXGCY

SEQ ID NO: 1921 - protein, 18 aa, Artificial Sequence
  Synthetically generated peptide
  VARIANT (3)..(4): Xaa = Any Amino Acid
  misc_feature (5)..(5): Xaa can be any naturally occurring amino acid
  misc_feature (16)..(16): Xaa can be any naturally occurring amino acid
CCXXXEYCCNPACTGXCY

SEQ ID NO: 1922 - protein, 18 aa, Artificial Sequence
  Synthetically generated peptide
  VARIANT (3)..(4): Xaa = Any Amino Acid
  misc_feature (5)..(5): Xaa can be any naturally occurring amino acid
  misc_feature (17)..(17): Xaa can be any naturally occurring amino acid
CCXXXEYCCNPACTGCXY

SEQ ID NO: 1923 - protein, 17 aa, Artificial Sequence
  Synthetically generated peptide
  VARIANT (3)..(4): Xaa = Any Amino Acid
  misc_feature (6)..(6): Xaa can be any naturally occurring amino acid
CCXXEXYCCNPACTGCY

SEQ ID NO: 1924 - protein, 18 aa, Artificial Sequence
  Synthetically generated peptide
  VARIANT (3)..(4): Xaa = Any Amino Acid
  misc_feature (6)..(7): Xaa can be any naturally occurring amino acid
CCXXEXXYCCNPACTGCY

SEQ ID NO: 1925 - protein, 18 aa, Artificial Sequence
  Synthetically generated peptide
  VARIANT (3)..(4): Xaa = Any Amino Acid
  misc_feature (6)..(6): Xaa can be any naturally occurring amino acid
  misc_feature (8)..(8): Xaa can be any naturally occurring amino acid
CCXXEXYXCCNPACTGCY

SEQ ID NO: 1926 - protein, 18 aa, Artificial Sequence
  Synthetically generated peptide
  VARIANT (3)..(4): Xaa = Any Amino Acid
  misc_feature (6)..(6): Xaa can be any naturally occurring amino acid
  misc_feature (10)..(10): Xaa can be any naturally occurring amino acid
CCXXEXYCCXNPACTGCY

SEQ ID NO: 1927 - protein, 18 aa, Artificial Sequence
  Synthetically generated peptide
  VARIANT (3)..(4): Xaa = Any Amino Acid
  misc_feature (6)..(6): Xaa can be any naturally occurring amino acid
  misc_feature (11)..(11): Xaa can be any naturally occurring amino acid
CCXXEXYCCNXPACTGCY

SEQ ID NO: 1928 - protein, 18 aa, Artificial Sequence
  Synthetically generated peptide
  VARIANT (3)..(4): Xaa = Any Amino Acid
  misc_feature (6)..(6): Xaa can be any naturally occurring amino acid
  misc_feature (12)..(12): Xaa can be any naturally occurring amino acid
CCXXEXYCCNPXACTGCY

SEQ ID NO: 1929 - protein, 18 aa, Artificial Sequence
  Synthetically generated peptide
  VARIANT (3)..(4): Xaa = Any Amino Acid
  misc_feature (6)..(6): Xaa can be any naturally occurring amino acid
  misc_feature (13)..(13): Xaa can be any naturally occurring amino acid
CCXXEXYCCNPAXCTGCY

SEQ ID NO: 1930 - protein, 18 aa, Artificial Sequence
  Synthetically generated peptide
  VARIANT (3)..(4): Xaa = Any Amino Acid
  misc_feature (6)..(6): Xaa can be any naturally occurring amino acid
  misc_feature (14)..(14): Xaa can be any naturally occurring amino acid
CCXXEXYCCNPACXTGCY

SEQ ID NO: 1931 - protein, 18 aa, Artificial Sequence
  Synthetically generated peptide
  VARIANT (3)..(4): Xaa = Any Amino Acid
  misc_feature (6)..(6): Xaa can be any naturally occurring amino acid
  misc_feature (15)..(15): Xaa can be any naturally occurring amino acid
CCXXEXYCCNPACTXGCY

SEQ ID NO: 1932 - protein, 18 aa, Artificial Sequence
  Synthetically generated peptide
  VARIANT (3)..(4): Xaa = Any Amino Acid
  misc_feature (6)..(6): Xaa can be any naturally occurring amino acid
  misc_feature (16)..(16): Xaa can be any naturally occurring amino acid
CCXXEXYCCNPACTGXCY

SEQ ID NO: 1933 - protein, 18 aa, Artificial Sequence
  Synthetically generated peptide
  VARIANT (3)..(4): Xaa = Any Amino Acid
  misc_feature (6)..(6): Xaa can be any naturally occurring amino acid
  misc_feature (17)..(17): Xaa can be any naturally occurring amino acid
CCXXEXYCCNPACTGCXY

SEQ ID NO: 1934 - protein, 17 aa, Artificial Sequence
  Synthetically generated peptide
  VARIANT (3)..(4): Xaa = Any Amino Acid
  misc_feature (7)..(7): Xaa can be any naturally occurring amino acid
CCXXEYXCCNPACTGCY

SEQ ID NO: 1935 - protein, 18 aa, Artificial Sequence
  Synthetically generated peptide
  VARIANT (3)..(4): Xaa = Any Amino Acid
  misc_feature (7)..(8): Xaa can be any naturally occurring amino acid
CCXXEYXXCCNPACTGCY

SEQ ID NO: 1936 - protein, 18 aa, Artificial Sequence
  Synthetically generated peptide
  VARIANT (3)..(4): Xaa = Any Amino Acid
  misc_feature (7)..(7): Xaa can be any naturally occurring amino acid
  misc_feature (10)..(10): Xaa can be any naturally occurring amino acid
CCXXEYXCCXNPACTGCY

SEQ ID NO: 1937 - protein, 18 aa, Artificial Sequence
  Synthetically generated peptide
  VARIANT (3)..(4): Xaa = Any Amino Acid
  misc_feature (7)..(7): Xaa can be any naturally occurring amino acid
  misc_feature (11)..(11): Xaa can be any naturally occurring amino acid
CCXXEYXCCNXPACTGCY

SEQ ID NO: 1938 - protein, 18 aa, Artificial Sequence
  Synthetically generated peptide
  VARIANT (3)..(4): Xaa = Any Amino Acid
  misc_feature (7)..(7): Xaa can be any naturally occurring amino acid
  misc_feature (12)..(12): Xaa can be any naturally occurring amino acid
CCXXEYXCCNPXACTGCY

SEQ ID NO: 1939 - protein, 18 aa, Artificial Sequence
  Synthetically generated peptide
  VARIANT (3)..(4): Xaa = Any Amino Acid
  misc_feature (7)..(7): Xaa can be any naturally occurring amino acid
  misc_feature (13)..(13): Xaa can be any naturally occurring amino acid
CCXXEYXCCNPAXCTGCY

SEQ ID NO: 1940 - protein, 18 aa, Artificial Sequence
  Synthetically generated peptide
  VARIANT (3)..(4): Xaa = Any Amino Acid
  misc_feature (7)..(7): Xaa can be any naturally occurring amino acid
  misc_feature (14)..(14): Xaa can be any naturally occurring amino acid
CCXXEYXCCNPACXTGCY

SEQ ID NO: 1941 - protein, 18 aa, Artificial Sequence
  Synthetically generated peptide
  VARIANT (3)..(4): Xaa = Any Amino Acid
  misc_feature (7)..(7): Xaa can be any naturally occurring amino acid
  misc_feature (15)..(15): Xaa can be any naturally occurring amino acid
CCXXEYXCCNPACTXGCY

SEQ ID NO: 1942 - protein, 18 aa, Artificial Sequence
  Synthetically generated peptide
  VARIANT (3)..(4): Xaa = Any Amino Acid
  misc_feature (7)..(7): Xaa can be any naturally occurring amino acid
  misc_feature (16)..(16): Xaa can be any naturally occurring amino acid
CCXXEYXCCNPACTGXCY

SEQ ID NO: 1943 - protein, 18 aa, Artificial Sequence
  Synthetically generated peptide
  VARIANT (3)..(4): Xaa = Any Amino Acid
  misc_feature (7)..(7): Xaa can be any naturally occurring amino acid
  misc_feature (17)..(17): Xaa can be any naturally occurring amino acid
CCXXEYXCCNPACTGCXY

SEQ ID NO: 1944 - protein, 17 aa, Artificial Sequence
  Synthetically generated peptide
  VARIANT (3)..(4): Xaa = Any Amino Acid
  misc_feature (9)..(9): Xaa can be any naturally occurring amino acid
CCXXEYCCXNPACTGCY

SEQ ID NO: 1945 - protein, 18 aa, Artificial Sequence
  Synthetically generated peptide
  VARIANT (3)..(4): Xaa = Any Amino Acid
  misc_feature (9)..(10): Xaa can be any naturally occurring amino acid
CCXXEYCCXXNPACTGCY

SEQ ID NO: 1946 - protein, 18 aa, Artificial Sequence
  Synthetically generated peptide
  VARIANT (3)..(4): Xaa = Any Amino Acid
  misc_feature (9)..(9): Xaa can be any naturally occurring amino acid
  misc_feature (11)..(11): Xaa can be any naturally occurring amino acid
CCXXEYCCXNXPACTGCY

SEQ ID NO: 1947 - protein, 18 aa, Artificial Sequence
  Synthetically generated peptide
  VARIANT (3)..(4): Xaa = Any Amino Acid
  misc_feature (9)..(9): Xaa can be any naturally occurring amino acid
  misc_feature (12)..(12): Xaa can be any naturally occurring amino acid
CCXXEYCCXNPXACTGCY

SEQ ID NO: 1948 - protein, 18 aa, Artificial Sequence
  Synthetically generated peptide
  VARIANT (3)..(4): Xaa = Any Amino Acid
  misc_feature (9)..(9): Xaa can be any naturally occurring amino acid
  misc_feature (13)..(13): Xaa can be any naturally occurring amino acid
CCXXEYCCXNPAXCTGCY

SEQ ID NO: 1949 - protein, 18 aa, Artificial Sequence
  Synthetically generated peptide
  VARIANT (3)..(4): Xaa = Any Amino Acid
  misc_feature (9)..(9): Xaa can be any naturally occurring amino acid
  misc_feature (14)..(14): Xaa can be any naturally occurring amino acid
CCXXEYCCXNPACXTGCY

SEQ ID NO: 1950 - protein, 18 aa, Artificial Sequence
  Synthetically generated peptide
  VARIANT (3)..(4): Xaa = Any Amino Acid
  misc_feature (9)..(9): Xaa can be any naturally occurring amino acid
  misc_feature (15)..(15): Xaa can be any naturally occurring amino acid
CCXXEYCCXNPACTXGCY

SEQ ID NO: 1951 - protein, 18 aa, Artificial Sequence
  Synthetically generated peptide
  VARIANT (3)..(4): Xaa = Any Amino Acid
  misc_feature (9)..(9): Xaa can be any naturally occurring amino acid
  misc_feature (16)..(16): Xaa can be any naturally occurring amino acid
CCXXEYCCXNPACTGXCY

SEQ ID NO: 1952 - protein, 18 aa, Artificial Sequence
  Synthetically generated peptide
  VARIANT (3)..(4): Xaa = Any Amino Acid
  misc_feature (9)..(9): Xaa can be any naturally occurring amino acid
  misc_feature (17)..(17): Xaa can be any naturally occurring amino acid
CCXXEYCCXNPACTGCXY

SEQ ID NO: 1953 - protein, 17 aa, Artificial Sequence
  Synthetically generated peptide
  VARIANT (3)..(4): Xaa = Any Amino Acid
  misc_feature (10)..(10): Xaa can be any naturally occurring amino acid
CCXXEYCCNXPACTGCY

SEQ ID NO: 1954 - protein, 18 aa, Artificial Sequence
  Synthetically generated peptide
  VARIANT (3)..(4): Xaa = Any Amino Acid
  misc_feature (10)..(11): Xaa can be any naturally occurring amino acid
CCXXEYCCNXXPACTGCY

SEQ ID NO: 1955 - protein, 18 aa, Artificial Sequence
  Synthetically generated peptide
  VARIANT (3)..(4): Xaa = Any Amino Acid
  misc_feature (10)..(10): Xaa can be any naturally occurring amino acid
  misc_feature (12)..(12): Xaa can be any naturally occurring amino acid
CCXXEYCCNXPXACTGCY

SEQ ID NO: 1956 - protein, 18 aa, Artificial Sequence
  Synthetically generated peptide
  VARIANT (3)..(4): Xaa = Any Amino Acid
  misc_feature (10)..(10): Xaa can be any naturally occurring amino acid
  misc_feature (13)..(13): Xaa can be any naturally occurring amino acid
CCXXEYCCNXPAXCTGCY

SEQ ID NO: 1957 - protein, 18 aa, Artificial Sequence
  Synthetically generated peptide
  VARIANT (3)..(4): Xaa = Any Amino Acid
  misc_feature (10)..(10): Xaa can be any naturally occurring amino acid
  misc_feature (14)..(14): Xaa can be any naturally occurring amino acid
CCXXEYCCNXPACXTGCY

SEQ ID NO: 1958 - protein, 18 aa, Artificial Sequence
  Synthetically generated peptide
  VARIANT (3)..(4): Xaa = Any Amino Acid
  misc_feature (10)..(10): Xaa can be any naturally occurring amino acid
  misc_feature (15)..(15): Xaa can be any naturally occurring amino acid
CCXXEYCCNXPACTXGCY

SEQ ID NO: 1959 - protein, 18 aa, Artificial Sequence
  Synthetically generated peptide
  VARIANT (3)..(4): Xaa = Any Amino Acid
  misc_feature (10)..(10): Xaa can be any naturally occurring amino acid
  misc_feature (16)..(16): Xaa can be any naturally occurring amino acid
CCXXEYCCNXPACTGXCY

SEQ ID NO: 1960 - protein, 18 aa, Artificial Sequence
  Synthetically generated peptide
  VARIANT (3)..(4): Xaa = Any Amino Acid
  misc_feature (10)..(10): Xaa can be any naturally occurring amino acid
  misc_feature (17)..(17): Xaa can be any naturally occurring amino acid
CCXXEYCCNXPACTGCXY

SEQ ID NO: 1961 - protein, 17 aa, Artificial Sequence
  Synthetically generated peptide
  VARIANT (3)..(4): Xaa = Any Amino Acid
  misc_feature (11)..(11): Xaa can be any naturally occurring amino acid
CCXXEYCCNPXACTGCY

SEQ ID NO: 1962 - protein, 18 aa, Artificial Sequence
  Synthetically generated peptide
  VARIANT (3)..(4): Xaa = Any Amino Acid
  misc_feature (11)..(12): Xaa can be any naturally occurring amino acid
CCXXEYCCNPXXACTGCY

SEQ ID NO: 1963 - protein, 18 aa, Artificial Sequence
  Synthetically generated peptide
  VARIANT (3)..(4): Xaa = Any Amino Acid
  misc_feature (11)..(11): Xaa can be any naturally occurring amino acid
  misc_feature (13)..(13): Xaa can be any naturally occurring amino acid
CCXXEYCCNPXAXCTGCY

SEQ ID NO: 1964 - protein, 18 aa, Artificial Sequence
  Synthetically generated peptide
  VARIANT (3)..(4): Xaa = Any Amino Acid
  misc_feature (11)..(11): Xaa can be any naturally occurring amino acid
  misc_feature (14)..(14): Xaa can be any naturally occurring amino acid
CCXXEYCCNPXACXTGCY

SEQ ID NO: 1965 - protein, 18 aa, Artificial Sequence
  Synthetically generated peptide
  VARIANT (3)..(4): Xaa = Any Amino Acid
  misc_feature (11)..(11): Xaa can be any naturally occurring amino acid
  misc_feature (15)..(15): Xaa can be any naturally occurring amino acid
CCXXEYCCNPXACTXGCY

SEQ ID NO: 1966 - protein, 18 aa, Artificial Sequence
  Synthetically generated peptide
  VARIANT (3)..(4): Xaa = Any Amino Acid
  misc_feature (11)..(11): Xaa can be any naturally occurring amino acid
  misc_feature (16)..(16): Xaa can be any naturally occurring amino acid
CCXXEYCCNPXACTGXCY

SEQ ID NO: 1967 - protein, 18 aa, Artificial Sequence
  Synthetically generated peptide
  VARIANT (3)..(4): Xaa = Any Amino Acid
  misc_feature (11)..(11): Xaa can be any naturally occurring amino acid
  misc_feature (17)..(17): Xaa can be any naturally occurring amino acid
CCXXEYCCNPXACTGCXY

SEQ ID NO: 1968 - protein, 17 aa, Artificial Sequence
  Synthetically generated peptide
  VARIANT (3)..(4): Xaa = Any Amino Acid
  misc_feature (12)..(12): Xaa can be any naturally occurring amino acid
CCXXEYCCNPAXCTGCY

SEQ ID NO: 1969 - protein, 18 aa, Artificial Sequence
  Synthetically generated peptide
  VARIANT (3)..(4): Xaa = Any Amino Acid
  misc_feature (12)..(13): Xaa can be any naturally occurring amino acid
CCXXEYCCNPAXXCTGCY

SEQ ID NO: 1970 - protein, 18 aa, Artificial Sequence
  Synthetically generated peptide
  VARIANT (3)..(4): Xaa = Any Amino Acid
  misc_feature (12)..(12): Xaa can be any naturally occurring amino acid
  misc_feature (14)..(14): Xaa can be any naturally occurring amino acid
CCXXEYCCNPAXCXTGCY

SEQ ID NO: 1971 - protein, 18 aa, Artificial Sequence
  Synthetically generated peptide
  VARIANT (3)..(4): Xaa = Any Amino Acid
  misc_feature (12)..(12): Xaa can be any naturally occurring amino acid
  misc_feature (15)..(15): Xaa can be any naturally occurring amino acid
CCXXEYCCNPAXCTXGCY

SEQ ID NO: 1972 - protein, 18 aa, Artificial Sequence
  Synthetically generated peptide
  VARIANT (3)..(4): Xaa = Any Amino Acid
  misc_feature (12)..(12): Xaa can be any naturally occurring amino acid
  misc_feature (16)..(16): Xaa can be any naturally occurring amino acid
CCXXEYCCNPAXCTGXCY

SEQ ID NO: 1973 - protein, 18 aa, Artificial Sequence
  Synthetically generated peptide
  VARIANT (3)..(4): Xaa = Any Amino Acid
  misc_feature (12)..(12): Xaa can be any naturally occurring amino acid
  misc_feature (17)..(17): Xaa can be any naturally occurring amino acid
CCXXEYCCNPAXCTGCXY

SEQ ID NO: 1974 - protein, 17 aa, Artificial Sequence
  Synthetically generated peptide
  VARIANT (3)..(4): Xaa = Any Amino Acid
  misc_feature (13)..(13): Xaa can be any naturally occurring amino acid
CCXXEYCCNPACXTGCY

SEQ ID NO: 1975 - protein, 18 aa, Artificial Sequence
  Synthetically generated peptide
  VARIANT (3)..(4): Xaa = Any Amino Acid
  misc_feature (13)..(14): Xaa can be any naturally occurring amino acid
CCXXEYCCNPACXXTGCY

SEQ ID NO: 1976 - protein, 18 aa, Artificial Sequence
  Synthetically generated peptide
  VARIANT (3)..(4): Xaa = Any Amino Acid
  misc_feature (13)..(13): Xaa can be any naturally occurring amino acid
  misc_feature (15)..(15): Xaa can be any naturally occurring amino acid
CCXXEYCCNPACXTXGCY

SEQ ID NO: 1977 - protein, 18 aa, Artificial Sequence
  Synthetically generated peptide
  VARIANT (3)..(4): Xaa = Any Amino Acid
  misc_feature (13)..(13): Xaa can be any naturally occurring amino acid
  misc_feature (16)..(16): Xaa can be any naturally occurring amino acid
CCXXEYCCNPACXTGXCY

SEQ ID NO: 1978 - protein, 18 aa, Artificial Sequence
  Synthetically generated peptide
  VARIANT (3)..(4): Xaa = Any Amino Acid
  misc_feature (13)..(13): Xaa can be any naturally occurring amino acid
  misc_feature (17)..(17): Xaa can be any naturally occurring amino acid
CCXXEYCCNPACXTGCXY

SEQ ID NO: 1979 - protein, 17 aa, Artificial Sequence
  Synthetically generated peptide
  VARIANT (3)..(4): Xaa = Any Amino Acid
  misc_feature (14)..(14): Xaa can be any naturally occurring amino acid
CCXXEYCCNPACTXGCY

SEQ ID NO: 1980 - protein, 18 aa, Artificial Sequence
  Synthetically generated peptide
  VARIANT (3)..(4): Xaa = Any Amino Acid
  misc_feature (14)..(15): Xaa can be any naturally occurring amino acid
CCXXEYCCNPACTXXGCY

SEQ ID NO: 1981 - protein, 18 aa, Artificial Sequence
  Synthetically generated peptide
  VARIANT (3)..(4): Xaa = Any Amino Acid
  misc_feature (14)..(14): Xaa can be any naturally occurring amino acid
  misc_feature (16)..(16): Xaa can be any naturally occurring amino acid
CCXXEYCCNPACTXGXCY

SEQ ID NO: 1982 - protein, 18 aa, Artificial Sequence
  Synthetically generated peptide
  VARIANT (3)..(4): Xaa = Any Amino Acid
  misc_feature (14)..(14): Xaa can be any naturally occurring amino acid
  misc_feature (17)..(17): Xaa can be any naturally occurring amino acid
CCXXEYCCNPACTXGCXY

SEQ ID NO: 1983 - protein, 17 aa, Artificial Sequence
  Synthetically generated peptide
  VARIANT (3)..(4): Xaa = Any Amino Acid
  misc_feature (15)..(15): Xaa can be any naturally occurring amino acid
CCXXEYCCNPACTGXCY

SEQ ID NO: 1984 - protein, 18 aa, Artificial Sequence
  Synthetically generated peptide
  VARIANT (3)..(4): Xaa = Any Amino Acid
  misc_feature (15)..(16): Xaa can be any naturally occurring amino acid
CCXXEYCCNPACTGXXCY

SEQ ID NO: 1985 - protein, 18 aa, Artificial Sequence
  Synthetically generated peptide
  VARIANT (3)..(4): Xaa = Any Amino Acid
  misc_feature (15)..(15): Xaa can be any naturally occurring amino acid
  misc_feature (17)..(17): Xaa can be any naturally occurring amino acid
CCXXEYCCNPACTGXCXY

SEQ ID NO: 1986 - protein, 17 aa, Artificial Sequence
  Synthetically generated peptide
  VARIANT (3)..(4): Xaa = Any Amino Acid
  misc_feature (16)..(16): Xaa can be any naturally occurring amino acid
CCXXEYCCNPACTGCXY

SEQ ID NO: 1987 - protein, 18 aa, Artificial Sequence
  Synthetically generated peptide
  VARIANT (3)..(4): Xaa = Any Amino Acid
  misc_feature (16)..(17): Xaa can be any naturally occurring amino acid
CCXXEYCCNPACTGCXXY

SEQ ID NO: 1988 - protein, 16 aa, Artificial Sequence
  Synthetically generated peptide
  VARIANT (3)..(5): Xaa = Any Amino Acid
CCXEXYCCNPACTGCY

SEQ ID NO: 1989 - protein, 17 aa, Artificial Sequence
  Synthetically generated peptide
  VARIANT (3)..(5): Xaa = Any Amino Acid
  misc_feature (6)..(6): Xaa can be any naturally occurring amino acid
CCXEXXYCCNPACTGCY

SEQ ID NO: 1990 - protein, 18 aa, Artificial Sequence
  Synthetically generated peptide
  VARIANT (3)..(5): Xaa = Any Amino Acid
  misc_feature (6)..(7): Xaa can be any naturally occurring amino acid
CCXEXXXYCCNPACTGCY

SEQ ID NO: 1991 - protein, 18 aa, Artificial Sequence
  Synthetically generated peptide
  VARIANT (3)..(5): Xaa = Any Amino Acid
  misc_feature (6)..(6): Xaa can be any naturally occurring amino acid
  misc_feature (8)..(8): Xaa can be any naturally occurring amino acid
CCXEXXYXCCNPACTGCY

SEQ ID NO: 1992 - protein, 18 aa, Artificial Sequence
  Synthetically generated peptide
  VARIANT (3)..(5): Xaa = Any Amino Acid
  misc_feature (6)..(6): Xaa can be any naturally occurring amino acid
  misc_feature (10)..(10): Xaa can be any naturally occurring amino acid
CCXEXXYCCXNPACTGCY

SEQ ID NO: 1993 - protein, 18 aa, Artificial Sequence
  Synthetically generated peptide
  VARIANT (3)..(5): Xaa = Any Amino Acid
  misc_feature (6)..(6): Xaa can be any naturally occurring amino acid
  misc_feature (11)..(11): Xaa can be any naturally occurring amino acid
CCXEXXYCCNXPACTGCY

SEQ ID NO: 1994 - protein, 18 aa, Artificial Sequence
  Synthetically generated peptide
  VARIANT (3)..(5): Xaa = Any Amino Acid
  misc_feature (6)..(6): Xaa can be any naturally occurring amino acid
  misc_feature (12)..(12): Xaa can be any naturally occurring amino acid
CCXEXXYCCNPXACTGCY

SEQ ID NO: 1995 - protein, 18 aa, Artificial Sequence
  Synthetically generated peptide
  VARIANT (3)..(5): Xaa = Any Amino Acid
  misc_feature (6)..(6): Xaa can be any naturally occurring amino acid
  misc_feature (13)..(13): Xaa can be any naturally occurring amino acid
CCXEXXYCCNPAXCTGCY

SEQ ID NO: 1996 - protein, 18 aa, Artificial Sequence
  Synthetically generated peptide
  VARIANT (3)..(5): Xaa = Any Amino Acid
  misc_feature (6)..(6): Xaa can be any naturally occurring amino acid
  misc_feature (14)..(14): Xaa can be any naturally occurring amino acid
CCXEXXYCCNPACXTGCY

SEQ ID NO: 1997 - protein, 18 aa, Artificial Sequence
  Synthetically generated peptide
  VARIANT (3)..(5): Xaa = Any Amino Acid
  misc_feature (6)..(6): Xaa can be any naturally occurring amino acid
  misc_feature (15)..(15): Xaa can be any naturally occurring amino acid
CCXEXXYCCNPACTXGCY

SEQ ID NO: 1998 - protein, 18 aa, Artificial Sequence
  Synthetically generated peptide
  VARIANT (3)..(5): Xaa = Any Amino Acid
  misc_feature (6)..(6): Xaa can be any naturally occurring amino acid
  misc_feature (16)..(16): Xaa can be any naturally occurring amino acid
CCXEXXYCCNPACTGXCY

SEQ ID NO: 1999 - protein, 18 aa, Artificial Sequence
  Synthetically generated peptide
  VARIANT (3)..(5): Xaa = Any Amino Acid
  misc_feature (6)..(6): Xaa can be any naturally occurring amino acid
  misc_feature (17)..(17): Xaa can be any naturally occurring amino acid
CCXEXXYCCNPACTGCXY

SEQ ID NO: 2000 - protein, 17 aa, Artificial Sequence
  Synthetically generated peptide
  VARIANT (3)..(5): Xaa = Any Amino Acid
  misc_feature (7)..(7): Xaa can be any naturally occurring amino acid
CCXEXYXCCNPACTGCY

SEQ ID NO: 2001 - protein, 18 aa, Artificial Sequence
  Synthetically generated peptide
  VARIANT (3)..(5): Xaa = Any Amino Acid
  misc_feature (7)..(8): Xaa can be any naturally occurring amino acid
CCXEXYXXCCNPACTGCY

SEQ ID NO: 2002 - protein, 18 aa, Artificial Sequence
  Synthetically generated peptide
  VARIANT (3)..(5): Xaa = Any Amino Acid
  misc_feature (7)..(7): Xaa can be any naturally occurring amino acid
  misc_feature (10)..(10): Xaa can be any naturally occurring amino acid
CCXEXYXCCXNPACTGCY

SEQ ID NO: 2003 - protein, 18 aa, Artificial Sequence
  Synthetically generated peptide
  VARIANT (3)..(5): Xaa = Any Amino Acid
  misc_feature (7)..(7): Xaa can be any naturally occurring amino acid
  misc_feature (11)..(11): Xaa can be any naturally occurring amino acid
CCXEXYXCCNXPACTGCY

SEQ ID NO: 2004 - protein, 18 aa, Artificial Sequence
  Synthetically generated peptide
  VARIANT (3)..(5): Xaa = Any Amino Acid
  misc_feature (7)..(7): Xaa can be any naturally occurring amino acid
  misc_feature (12)..(12): Xaa can be any naturally occurring amino acid
CCXEXYXCCNPXACTGCY

SEQ ID NO: 2005 - protein, 18 aa, Artificial Sequence
  Synthetically generated peptide
  VARIANT (3)..(5): Xaa = Any Amino Acid
  misc_feature (7)..(7): Xaa can be any naturally occurring amino acid
  misc_feature (13)..(13): Xaa can be any naturally occurring amino acid
CCXEXYXCCNPAXCTGCY

SEQ ID NO: 2006 - protein, 18 aa, Artificial Sequence
  Synthetically generated peptide
  VARIANT (3)..(5): Xaa = Any Amino Acid
  misc_feature (7)..(7): Xaa can be any naturally occurring amino acid
  misc_feature (14)..(14): Xaa can be any naturally occurring amino acid
CCXEXYXCCNPACXTGCY

SEQ ID NO: 2007 - protein, 18 aa, Artificial Sequence
  Synthetically generated peptide
  VARIANT (3)..(5): Xaa = Any Amino Acid
  misc_feature (7)..(7): Xaa can be any naturally occurring amino acid
  misc_feature (15)..(15): Xaa can be any naturally occurring amino acid
CCXEXYXCCNPACTXGCY

SEQ ID NO: 2008 - protein, 18 aa, Artificial Sequence
  Synthetically generated peptide
  VARIANT (3)..(5): Xaa = Any Amino Acid
  misc_feature (7)..(7): Xaa can be any naturally occurring amino acid
  misc_feature (16)..(16): Xaa can be any naturally occurring amino acid
CCXEXYXCCNPACTGXCY

SEQ ID NO: 2009 - protein, 18 aa, Artificial Sequence
  Synthetically generated peptide
  VARIANT (3)..(5): Xaa = Any Amino Acid
  misc_feature (7)..(7): Xaa can be any naturally occurring amino acid
  misc_feature (17)..(17): Xaa can be any naturally occurring amino acid
CCXEXYXCCNPACTGCXY

SEQ ID NO: 2010 - protein, 17 aa, Artificial Sequence
  Synthetically generated peptide
  VARIANT (3)..(5): Xaa = Any Amino Acid
  misc_feature (9)..(9): Xaa can be any naturally occurring amino acid
CCXEXYCCXNPACTGCY

SEQ ID NO: 2011 - protein, 18 aa, Artificial Sequence
  Synthetically generated peptide
  VARIANT (3)..(5): Xaa = Any Amino Acid
  misc_feature (9)..(10): Xaa can be any naturally occurring amino acid
CCXEXYCCXXNPACTGCY

SEQ ID NO: 2012 - protein, 18 aa, Artificial Sequence
  Synthetically generated peptide
  VARIANT (3)..(5): Xaa = Any Amino Acid
  misc_feature (9)..(9): Xaa can be any naturally occurring amino acid
  misc_feature (11)..(11): Xaa can be any naturally occurring amino acid
CCXEXYCCXNXPACTGCY

SEQ ID NO: 2013 - protein, 18 aa, Artificial Sequence
  Synthetically generated peptide
  VARIANT (3)..(5): Xaa = Any Amino Acid
  misc_feature (9)..(9): Xaa can be any naturally occurring amino acid
  misc_feature (12)..(12): Xaa can be any naturally occurring amino acid
CCXEXYCCXNPXACTGCY

SEQ ID NO: 2014 - protein, 18 aa, Artificial Sequence
  Synthetically generated peptide
  VARIANT (3)..(5): Xaa = Any Amino Acid
  misc_feature (9)..(9): Xaa can be any naturally occurring amino acid
  misc_feature (13)..(13): Xaa can be any naturally occurring amino acid
CCXEXYCCXNPAXCTGCY

SEQ ID NO: 2015 - protein, 18 aa, Artificial Sequence
  Synthetically generated peptide
  VARIANT (3)..(5): Xaa = Any Amino Acid
  misc_feature (9)..(9): Xaa can be any naturally occurring amino acid
  misc_feature (14)..(14): Xaa can be any naturally occurring amino acid
CCXEXYCCXNPACXTGCY

SEQ ID NO: 2016 - protein, 18 aa, Artificial Sequence
  Synthetically generated peptide
  VARIANT (3)..(5): Xaa = Any Amino Acid
  misc_feature (9)..(9): Xaa can be any naturally occurring amino acid
  misc_feature (15)..(15): Xaa can be any naturally occurring amino acid
CCXEXYCCXNPACTXGCY

SEQ ID NO: 2017 - protein, 18 aa, Artificial Sequence
  Synthetically generated peptide
  VARIANT (3)..(8): Xaa = Any Amino Acid
  misc_feature (9)..(9): Xaa can be any naturally occurring amino acid
  misc_feature (16)..(16): Xaa can be any naturally occurring amino acid
CCXEYCCXXNPACTGXCY

SEQ ID NO: 2018 - protein, 18 aa, Artificial Sequence
  Synthetically generated peptide
  VARIANT (3)..(8): Xaa = Any Amino Acid
  misc_feature (9)..(9): Xaa can be any naturally occurring amino acid
  misc_feature (17)..(17): Xaa can be any naturally occurring amino acid
CCXEYCCXXNPACTGCXY

SEQ ID NO: 2019 - protein, 17 aa, Artificial Sequence
  Synthetically generated peptide
  VARIANT (3)..(8): Xaa = Any Amino Acid
  misc_feature (10)..(10): Xaa can be any naturally occurring amino acid
CCXEYCCXNXPACTGCY

SEQ ID NO: 2020 - protein, 18 aa, Artificial Sequence
  Synthetically generated peptide
  VARIANT (3)..(8): Xaa = Any Amino Acid
  misc_feature (10)..(11): Xaa can be any naturally occurring amino acid
CCXEYCCXNXXPACTGCY

SEQ ID NO: 2021 - protein, 18 aa, Artificial Sequence
  Synthetically generated peptide
  VARIANT (3)..(8): Xaa = Any Amino Acid
  misc_feature (10)..(10): Xaa can be any naturally occurring amino acid
  misc_feature (12)..(12): Xaa can be any naturally occurring amino acid
CCXEYCCXNXPXACTGCY

SEQ ID NO: 2022 - protein, 18 aa, Artificial Sequence
  Synthetically generated peptide
  VARIANT (3)..(8): Xaa = Any Amino Acid
  misc_feature (10)..(10): Xaa can be any naturally occurring amino acid
  misc_feature (13)..(13): Xaa can be any naturally occurring amino acid
CCXEYCCXNXPAXCTGCY

SEQ ID NO: 2023 - protein, 18 aa, Artificial Sequence
  Synthetically generated peptide
  VARIANT (3)..(8): Xaa = Any Amino Acid
  misc_feature (10)..(10): Xaa can be any naturally occurring amino acid
  misc_feature (14)..(14): Xaa can be any naturally occurring amino acid
CCXEYCCXNXPACXTGCY

SEQ ID NO: 2024 - protein, 18 aa, Artificial Sequence
  Synthetically generated peptide
  VARIANT (3)..(8): Xaa = Any Amino Acid
  misc_feature (10)..(10): Xaa can be any naturally occurring amino acid
  misc_feature (15)..(15): Xaa can be any naturally occurring amino acid
CCXEYCCXNXPACTXGCY

SEQ ID NO: 2025 - protein, 18 aa, Artificial Sequence
  Synthetically generated peptide
  VARIANT (3)..(8): Xaa = Any Amino Acid
  misc_feature (10)..(10): Xaa can be any naturally occurring amino acid
  misc_feature (16)..(16): Xaa can be any naturally occurring amino acid
CCXEYCCXNXPACTGXCY

SEQ ID NO: 2026 - protein, 18 aa, Artificial Sequence
  Synthetically generated peptide
  VARIANT (3)..(8): Xaa = Any Amino Acid
  misc_feature (10)..(10): Xaa can be any naturally occurring amino acid
  misc_feature (17)..(17): Xaa can be any naturally occurring amino acid
CCXEYCCXNXPACTGCXY

SEQ ID NO: 2027 - protein, 17 aa, Artificial Sequence
  Synthetically generated peptide
  VARIANT (3)..(8): Xaa = Any Amino Acid
  misc_feature (11)..(11): Xaa can be any naturally occurring amino acid
CCXEYCCXNPXACTGCY

SEQ ID NO: 2028 - protein, 18 aa, Artificial Sequence
  Synthetically generated peptide
  VARIANT (3)..(8): Xaa = Any Amino Acid
  misc_feature (11)..(12): Xaa can be any naturally occurring amino acid
CCXEYCCXNPXXACTGCY

SEQ ID NO: 2029 - protein, 18 aa, Artificial Sequence
  Synthetically generated peptide
  VARIANT (3)..(8): Xaa = Any Amino Acid
  misc_feature (11)..(11): Xaa can be any naturally occurring amino acid
  misc_feature (13)..(13): Xaa can be any naturally occurring amino acid
CCXEYCCXNPXAXCTGCY

SEQ ID NO: 2030 - protein, 18 aa, Artificial Sequence
  Synthetically generated peptide
  VARIANT (3)..(8): Xaa = Any Amino Acid
  misc_feature (11)..(11): Xaa can be any naturally occurring amino acid
  misc_feature (14)..(14): Xaa can be any naturally occurring amino acid
CCXEYCCXNPXACXTGCY

SEQ ID NO: 2031 - protein, 18 aa, Artificial Sequence
  Synthetically generated peptide
  VARIANT (3)..(8): Xaa = Any Amino Acid
  misc_feature (11)..(11): Xaa can be any naturally occurring amino acid
  misc_feature (15)..(15): Xaa can be any naturally occurring amino acid
CCXEYCCXNPXACTXGCY

SEQ ID NO: 2032 - protein, 18 aa, Artificial Sequence
  Synthetically generated peptide
  VARIANT (3)..(8): Xaa = Any Amino Acid
  misc_feature (11)..(11): Xaa can be any naturally occurring amino acid
  misc_feature (16)..(16): Xaa can be any naturally occurring amino acid
CCXEYCCXNPXACTGXCY

SEQ ID NO: 2033 - protein, 18 aa, Artificial Sequence
  Synthetically generated peptide
  VARIANT (3)..(8): Xaa = Any Amino Acid
  misc_feature (11)..(11): Xaa can be any naturally occurring amino acid
  misc_feature (17)..(17): Xaa can be any naturally occurring amino acid
CCXEYCCXNPXACTGCXY

SEQ ID NO: 2034 - protein, 17 aa, Artificial Sequence
  Synthetically generated peptide
  VARIANT (3)..(8): Xaa = Any Amino Acid
  misc_feature (12)..(12): Xaa can be any naturally occurring amino acid
CCXEYCCXNPAXCTGCY

SEQ ID NO: 2035 - protein, 18 aa, Artificial Sequence
  Synthetically generated peptide
  VARIANT (3)..(8): Xaa = Any Amino Acid
  misc_feature (12)..(13): Xaa can be any naturally occurring amino acid
CCXEYCCXNPAXXCTGCY

SEQ ID NO: 2036 - protein, 18 aa, Artificial Sequence
  Synthetically generated peptide
  VARIANT (3)..(8): Xaa = Any Amino Acid
  misc_feature (12)..(12): Xaa can be any naturally occurring amino acid
  misc_feature (14)..(14): Xaa can be any naturally occurring amino acid
CCXEYCCXNPAXCXTGCY

SEQ ID NO: 2037 - protein, 18 aa, Artificial Sequence
  Synthetically generated peptide
  VARIANT (3)..(8): Xaa = Any Amino Acid
  misc_feature (12)..(12): Xaa can be any naturally occurring amino acid
  misc_feature (15)..(15): Xaa can be any naturally occurring amino acid
CCXEYCCXNPAXCTXGCY

SEQ ID NO: 2038 - protein, 18 aa, Artificial Sequence
  Synthetically generated peptide
  VARIANT (3)..(8): Xaa = Any Amino Acid
  misc_feature (12)..(12): Xaa can be any naturally occurring amino acid
  misc_feature (16)..(16): Xaa can be any naturally occurring amino acid
CCXEYCCXNPAXCTGXCY

SEQ ID NO: 2039 - protein, 18 aa, Artificial Sequence
  Synthetically generated peptide
  VARIANT (3)..(8): Xaa = Any Amino Acid
  misc_feature (12)..(12): Xaa can be any naturally occurring amino acid
  misc_feature (17)..(17): Xaa can be any naturally occurring amino acid
CCXEYCCXNPAXCTGCXY

SEQ ID NO: 2040 - protein, 17 aa, Artificial Sequence
  Synthetically generated peptide
  VARIANT (3)..(8): Xaa = Any Amino Acid
  misc_feature (13)..(13): Xaa can be any naturally occurring amino acid
CCXEYCCXNPACXTGCY

SEQ ID NO: 2041 - protein, 18 aa, Artificial Sequence
  Synthetically generated peptide
  VARIANT (3)..(8): Xaa = Any Amino Acid
  misc_feature (13)..(14): Xaa can be any naturally occurring amino acid
CCXEYCCXNPACXXTGCY

SEQ ID NO: 2042 - protein, 18 aa, Artificial Sequence
  Synthetically generated peptide
  VARIANT (3)..(8): Xaa = Any Amino Acid
  misc_feature (13)..(13): Xaa can be any naturally occurring amino acid
  misc_feature (15)..(15): Xaa can be any naturally occurring amino acid
CCXEYCCXNPACXTXGCY

SEQ ID NO: 2043 - protein, 18 aa, Artificial Sequence
  Synthetically generated peptide
  VARIANT (3)..(8): Xaa = Any Amino Acid
  misc_feature (13)..(13): Xaa can be any naturally occurring amino acid
  misc_feature (16)..(16): Xaa can be any naturally occurring amino acid
CCXEYCCXNPACXTGXCY

SEQ ID NO: 2044 - protein, 18 aa, Artificial Sequence
  Synthetically generated peptide
  VARIANT (3)..(8): Xaa = Any Amino Acid
  misc_feature (13)..(13): Xaa can be any naturally occurring amino acid
  misc_feature (17)..(17): Xaa can be any naturally occurring amino acid
CCXEYCCXNPACXTGCXY

SEQ ID NO: 2045 - protein, 17 aa, Artificial Sequence
  Synthetically generated peptide
  VARIANT (3)..(8): Xaa = Any Amino Acid
  misc_feature (14)..(14): Xaa can be any naturally occurring amino acid
CCXEYCCXNPACTXGCY

SEQ ID NO: 2046 - protein, 18 aa, Artificial Sequence
  Synthetically generated peptide
  VARIANT (3)..(8): Xaa = Any Amino Acid
  misc_feature (14)..(15): Xaa can be any naturally occurring amino acid
CCXEYCCXNPACTXXGCY

SEQ ID NO: 2047 - protein, 18 aa, Artificial Sequence
  Synthetically generated peptide
  VARIANT (3)..(8): Xaa = Any Amino Acid
  misc_feature (14)..(14): Xaa can be any naturally occurring amino acid
  misc_feature (16)..(16): Xaa can be any naturally occurring amino acid
CCXEYCCXNPACTXGXCY

SEQ ID NO: 2048 - protein, 18 aa, Artificial Sequence
  Synthetically generated peptide
  VARIANT (3)..(8): Xaa = Any Amino Acid
  misc_feature (14)..(14): Xaa can be any naturally occurring amino acid
  misc_feature (17)..(17): Xaa can be any naturally occurring amino acid
CCXEYCCXNPACTXGCXY

SEQ ID NO: 2049 - protein, 17 aa, Artificial Sequence
  Synthetically generated peptide
  VARIANT (3)..(8): Xaa = Any Amino Acid
  misc_feature (15)..(15): Xaa can be any naturally occurring amino acid
CCXEYCCXNPACTGXCY

SEQ ID NO: 2050 - protein, 18 aa, Artificial Sequence
  Synthetically generated peptide
  VARIANT (3)..(8): Xaa = Any Amino Acid
  misc_feature (15)..(16): Xaa can be any naturally occurring amino acid
CCXEYCCXNPACTGXXCY

SEQ ID NO: 2051 - protein, 18 aa, Artificial Sequence
  Synthetically generated peptide
  VARIANT (3)..(8): Xaa = Any Amino Acid
  misc_feature (15)..(15): Xaa can be any naturally occurring amino acid
  misc_feature (17)..(17): Xaa can be any naturally occurring amino acid
CCXEYCCXNPACTGXCXY

SEQ ID NO: 2052 - protein, 17 aa, Artificial Sequence
  Synthetically generated peptide
  VARIANT (3)..(8): Xaa = Any Amino Acid
  misc_feature (16)..(16): Xaa can be any naturally occurring amino acid
CCXEYCCXNPACTGCXY

SEQ ID NO: 2053 - protein, 18 aa, Artificial Sequence
  Synthetically generated peptide
  VARIANT (3)..(8): Xaa = Any Amino Acid
  misc_feature (16)..(17): Xaa can be any naturally occurring amino acid
CCXEYCCXNPACTGCXXY

SEQ ID NO: 2054 - protein, 16 aa, Artificial Sequence
  Synthetically generated peptide
  VARIANT (3)..(9): Xaa = Any Amino Acid
CCXEYCCNXPACTGCY

SEQ ID NO: 2055 - protein, 17 aa, Artificial Sequence
  Synthetically generated peptide
  VARIANT (3)..(9): Xaa = Any Amino Acid
  misc_feature (10)..(10): Xaa can be any naturally occurring amino acid
CCXEYCCNXXPACTGCY

SEQ ID NO: 2056 - protein, 18 aa, Artificial Sequence
  Synthetically generated peptide
  VARIANT (3)..(9): Xaa = Any Amino Acid
  misc_feature (10)..(11): Xaa can be any naturally occurring amino acid
CCXEYCCNXXXPACTGCY

SEQ ID NO: 2057 - protein, 18 aa, Artificial Sequence
  Synthetically generated peptide
  VARIANT (3)..(9): Xaa = Any Amino Acid
  misc_feature (10)..(10): Xaa can be any naturally occurring amino acid
  misc_feature (12)..(12): Xaa can be any naturally occurring amino acid
CCXEYCCNXXPXACTGCY

SEQ ID NO: 2058 - protein, 18 aa, Artificial Sequence
  Synthetically generated peptide
  VARIANT (3)..(9): Xaa = Any Amino Acid
  misc_feature (10)..(10): Xaa can be any naturally occurring amino acid
  misc_feature (13)..(13): Xaa can be any naturally occurring amino acid
CCXEYCCNXXPAXCTGCY

SEQ ID NO: 2059 - protein, 18 aa, Artificial Sequence
  Synthetically generated peptide
  VARIANT (3)..(9): Xaa = Any Amino Acid
  misc_feature (10)..(10): Xaa can be any naturally occurring amino acid
  misc_feature (14)..(14): Xaa can be any naturally occurring amino acid
CCXEYCCNXXPACXTGCY

SEQ ID NO: 2060 - protein, 18 aa, Artificial Sequence
  Synthetically generated peptide
  VARIANT (3)..(9): Xaa = Any Amino Acid
  misc_feature (10)..(10): Xaa can be any naturally occurring amino acid
  misc_feature (15)..(15): Xaa can be any naturally occurring amino acid
CCXEYCCNXXPACTXGCY

SEQ ID NO: 2061 - protein, 18 aa, Artificial Sequence
  Synthetically generated peptide
  VARIANT (3)..(9): Xaa = Any Amino Acid
  misc_feature (10)..(10): Xaa can be any naturally occurring amino acid
  misc_feature (16)..(16): Xaa can be any naturally occurring amino acid
CCXEYCCNXXPACTGXCY

SEQ ID NO: 2062 - protein, 18 aa, Artificial Sequence
  Synthetically generated peptide
  VARIANT (3)..(9): Xaa = Any Amino Acid
  misc_feature (10)..(10): Xaa can be any naturally occurring amino acid
  misc_feature (17)..(17): Xaa can be any naturally occurring amino acid
CCXEYCCNXXPACTGCXY

SEQ ID NO: 2063 - protein, 17 aa, Artificial Sequence
  Synthetically generated peptide
  VARIANT (3)..(9): Xaa = Any Amino Acid
  misc_feature (11)..(11): Xaa can be any naturally occurring amino acid
CCXEYCCNXPXACTGCY

SEQ ID NO: 2064 - protein, 18 aa, Artificial Sequence
  Synthetically generated peptide
  VARIANT (3)..(9): Xaa = Any Amino Acid
  misc_feature (11)..(12): Xaa can be any naturally occurring amino acid
CCXEYCCNXPXXACTGCY

SEQ ID NO: 2065 - protein, 18 aa, Artificial Sequence
  Synthetically generated peptide
  VARIANT (3)..(9): Xaa = Any Amino Acid
  misc_feature (11)..(11): Xaa can be any naturally occurring amino acid
  misc_feature (13)..(13): Xaa can be any naturally occurring amino acid
CCXEYCCNXPXAXCTGCY

SEQ ID NO: 2066 - protein, 18 aa, Artificial Sequence
  Synthetically generated peptide
  VARIANT (3)..(9): Xaa = Any Amino Acid
  misc_feature (11)..(11): Xaa can be any naturally occurring amino acid
  misc_feature (14)..(14): Xaa can be any naturally occurring amino acid
CCXEYCCNXPXACXTGCY

SEQ ID NO: 2067 - protein, 18 aa, Artificial Sequence
  Synthetically generated peptide
  VARIANT (3)..(9): Xaa = Any Amino Acid
  misc_feature (11)..(11): Xaa can be any naturally occurring amino acid
  misc_feature (15)..(15): Xaa can be any naturally occurring amino acid
CCXEYCCNXPXACTXGCY

SEQ ID NO: 2068 - protein, 18 aa, Artificial Sequence
  Synthetically generated peptide
  VARIANT (3)..(9): Xaa = Any Amino Acid
  misc_feature (11)..(11): Xaa can be any naturally occurring amino acid
  misc_feature (16)..(16): Xaa can be any naturally occurring amino acid
CCXEYCCNXPXACTGXCY

SEQ ID NO: 2069 - protein, 18 aa, Artificial Sequence
  Synthetically generated peptide
  VARIANT (3)..(9): Xaa = Any Amino Acid
  misc_feature (11)..(11): Xaa can be any naturally occurring amino acid
  misc_feature (17)..(17): Xaa can be any naturally occurring amino acid
CCXEYCCNXPXACTGCXY

SEQ ID NO: 2070 - protein, 17 aa, Artificial Sequence
  Synthetically generated peptide
  VARIANT (3)..(9): Xaa = Any Amino Acid
  misc_feature (12)..(12): Xaa can be any naturally occurring amino acid
CCXEYCCNXPAXCTGCY

SEQ ID NO: 2071 - protein, 18 aa, Artificial Sequence
  Synthetically generated peptide
  VARIANT (3)..(9): Xaa = Any Amino Acid
  misc_feature (12)..(13): Xaa can be any naturally occurring amino acid
CCXEYCCNXPAXXCTGCY

SEQ ID NO: 2072 - protein, 18 aa, Artificial Sequence
  Synthetically generated peptide
  VARIANT (3)..(9): Xaa = Any Amino Acid
  misc_feature (12)..(12): Xaa can be any naturally occurring amino acid
  misc_feature (14)..(14): Xaa can be any naturally occurring amino acid
CCXEYCCNXPAXCXTGCY

SEQ ID NO: 2073 - protein, 18 aa, Artificial Sequence
  Synthetically generated peptide
  VARIANT (3)..(9): Xaa = Any Amino Acid
  misc_feature (12)..(12): Xaa can be any naturally occurring amino acid
  misc_feature (15)..(15): Xaa can be any naturally occurring amino acid
CCXEYCCNXPAXCTXGCY

SEQ ID NO: 2074 - protein, 18 aa, Artificial Sequence
  Synthetically generated peptide
  VARIANT (3)..(9): Xaa = Any Amino Acid
  misc_feature (12)..(12): Xaa can be any naturally occurring amino acid
  misc_feature (16)..(16): Xaa can be any naturally occurring amino acid
CCXEYCCNXPAXCTGXCY

SEQ ID NO: 2075 - protein, 18 aa, Artificial Sequence
  Synthetically generated peptide
  VARIANT (3)..(9): Xaa = Any Amino Acid
  misc_feature (12)..(12): Xaa can be any naturally occurring amino acid
  misc_feature (17)..(17): Xaa can be any naturally occurring amino acid
CCXEYCCNXPAXCTGCXY

SEQ ID NO: 2076 - protein, 17 aa, Artificial Sequence
  Synthetically generated peptide
  VARIANT (3)..(9): Xaa = Any Amino Acid
  misc_feature (13)..(13): Xaa can be any naturally occurring amino acid
CCXEYCCNXPACXTGCY

SEQ ID NO: 2077 - protein, 18 aa, Artificial Sequence
  Synthetically generated peptide
  VARIANT (3)..(9): Xaa = Any Amino Acid
  misc_feature (13)..(14): Xaa can be any naturally occurring amino acid
CCXEYCCNXPACXXTGCY

SEQ ID NO: 2078 - protein, 18 aa, Artificial Sequence
  Synthetically generated peptide
  VARIANT (3)..(9): Xaa = Any Amino Acid
  misc_feature (13)..(13): Xaa can be any naturally occurring amino acid
  misc_feature (15)..(15): Xaa can be any naturally occurring amino acid
CCXEYCCNXPACXTXGCY

SEQ ID NO: 2079 - protein, 18 aa, Artificial Sequence
  Synthetically generated peptide
  VARIANT (3)..(9): Xaa = Any Amino Acid
  misc_feature (13)..(13): Xaa can be any naturally occurring amino acid
  misc_feature (16)..(16): Xaa can be any naturally occurring amino acid
CCXEYCCNXPACXTGXCY

SEQ ID NO: 2080 - protein, 18 aa, Artificial Sequence
  Synthetically generated peptide
  VARIANT (3)..(9): Xaa = Any Amino Acid
  misc_feature (13)..(13): Xaa can be any naturally occurring amino acid
  misc_feature (17)..(17): Xaa can be any naturally occurring amino acid
CCXEYCCNXPACXTGCXY

SEQ ID NO: 2081 - protein, 17 aa, Artificial Sequence
  Synthetically generated peptide
  VARIANT (3)..(9): Xaa = Any Amino Acid
  misc_feature (14)..(14): Xaa can be any naturally occurring amino acid
CCXEYCCNXPACTXGCY

SEQ ID NO: 2082 - protein, 18 aa, Artificial Sequence
  Synthetically generated peptide
  VARIANT (3)..(9): Xaa = Any Amino Acid
  misc_feature (14)..(15): Xaa can be any naturally occurring amino acid
CCXEYCCNXPACTXXGCY

SEQ ID NO: 2083 - protein, 18 aa, Artificial Sequence
  Synthetically generated peptide
  VARIANT (3)..(9): Xaa = Any Amino Acid
  misc_feature (14)..(14): Xaa can be any naturally occurring amino acid
  misc_feature (16)..(16): Xaa can be any naturally occurring amino acid
CCXEYCCNXPACTXGXCY

SEQ ID NO: 2084 - protein, 18 aa, Artificial Sequence
  Synthetically generated peptide
  VARIANT (3)..(9): Xaa = Any Amino Acid
  misc_feature (14)..(14): Xaa can be any naturally occurring amino acid
  misc_feature (17)..(17): Xaa can be any naturally occurring amino acid
CCXEYCCNXPACTXGCXY

SEQ ID NO: 2085 - protein, 17 aa, Artificial Sequence
  Synthetically generated peptide
  VARIANT (3)..(9): Xaa = Any Amino Acid
  misc_feature (15)..(15): Xaa can be any naturally occurring amino acid
CCXEYCCNXPACTGXCY

SEQ ID NO: 2086 - protein, 18 aa, Artificial Sequence
  Synthetically generated peptide
  VARIANT (3)..(9): Xaa = Any Amino Acid
  misc_feature (15)..(16): Xaa can be any naturally occurring amino acid
CCXEYCCNXPACTGXXCY

SEQ ID NO: 2087 - protein, 18 aa, Artificial Sequence
  Synthetically generated peptide
  VARIANT (3)..(9): Xaa = Any Amino Acid
  misc_feature (15)..(15): Xaa can be any naturally occurring amino acid
  misc_feature (17)..(17): Xaa can be any naturally occurring amino acid
CCXEYCCNXPACTGXCXY

SEQ ID NO: 2088 - protein, 17 aa, Artificial Sequence
  Synthetically generated peptide
  VARIANT (3)..(9): Xaa = Any Amino Acid
  misc_feature (16)..(16): Xaa can be any naturally occurring amino acid
CCXEYCCNXPACTGCXY

SEQ ID NO: 2089 - protein, 18 aa, Artificial Sequence
  Synthetically generated peptide
  VARIANT (3)..(9): Xaa = Any Amino Acid
  misc_feature (16)..(17): Xaa can be any naturally occurring amino acid
CCXEYCCNXPACTGCXXY

SEQ ID NO: 2090 - protein, 16 aa, Artificial Sequence
  Synthetically generated peptide
  VARIANT (3)..(10): Xaa = Any Amino Acid
CCXEYCCNPXACTGCY

SEQ ID NO: 2091 - protein, 17 aa, Artificial Sequence
  Synthetically generated peptide
  VARIANT (3)..(10): Xaa = Any Amino Acid
  misc_feature (11)..(11): Xaa can be any naturally occurring amino acid
CCXEYCCNPXXACTGCY

SEQ ID NO: 2092 - protein, 18 aa, Artificial Sequence
  Synthetically generated peptide
  VARIANT (3)..(10): Xaa = Any Amino Acid
  misc_feature (11)..(12): Xaa can be any naturally occurring amino acid
CCXEYCCNPXXXACTGCY

SEQ ID NO: 2093 - protein, 18 aa, Artificial Sequence
  Synthetically generated peptide
  VARIANT (3)..(10): Xaa = Any Amino Acid
  misc_feature (11)..(11): Xaa can be any naturally occurring amino acid
  misc_feature (13)..(13): Xaa can be any naturally occurring amino acid
CCXEYCCNPXXAXCTGCY

SEQ ID NO: 2094 - protein, 18 aa, Artificial Sequence
  Synthetically generated peptide
  VARIANT (3)..(10): Xaa = Any Amino Acid
  misc_feature (11)..(11): Xaa can be any naturally occurring amino acid
  misc_feature (14)..(14): Xaa can be any naturally occurring amino acid
CCXEYCCNPXXACXTGCY

SEQ ID NO: 2095 - protein, 18 aa, Artificial Sequence
  Synthetically generated peptide
  VARIANT (3)..(10): Xaa = Any Amino Acid
  misc_feature (11)..(11): Xaa can be any naturally occurring amino acid
  misc_feature (15)..(15): Xaa can be any naturally occurring amino acid
CCXEYCCNPXXACTXGCY

SEQ ID NO: 2096 - protein, 18 aa, Artificial Sequence
  Synthetically generated peptide
  VARIANT (3)..(10): Xaa = Any Amino Acid
  misc_feature (11)..(11): Xaa can be any naturally occurring amino acid
  misc_feature (16)..(16): Xaa can be any naturally occurring amino acid
CCXEYCCNPXXACTGXCY

SEQ ID NO: 2097 - protein, 18 aa, Artificial Sequence
  Synthetically generated peptide
  VARIANT (3)..(10): Xaa = Any Amino Acid
  misc_feature (11)..(11): Xaa can be any naturally occurring amino acid
  misc_feature (17)..(17): Xaa can be any naturally occurring amino acid
CCXEYCCNPXXACTGCXY

SEQ ID NO: 2098 - protein, 17 aa, Artificial Sequence
  Synthetically generated peptide
  VARIANT (3)..(10): Xaa = Any Amino Acid
  misc_feature (12)..(12): Xaa can be any naturally occurring amino acid
CCXEYCCNPXAXCTGCY

SEQ ID NO: 2099 - protein, 18 aa, Artificial Sequence
  Synthetically generated peptide
  VARIANT (3)..(10): Xaa = Any Amino Acid
  misc_feature (12)..(13): Xaa can be any naturally occurring amino acid
CCXEYCCNPXAXXCTGCY

SEQ ID NO: 2100 - protein, 18 aa, Artificial Sequence
  Synthetically generated peptide
  VARIANT (3)..(10): Xaa = Any Amino Acid
  misc_feature (12)..(12): Xaa can be any naturally occurring amino acid
  misc_feature (14)..(14): Xaa can be any naturally occurring amino acid
CCXEYCCNPXAXCXTGCY

SEQ ID NO: 2101 - protein, 18 aa, Artificial Sequence
  Synthetically generated peptide
  VARIANT (3)..(10): Xaa = Any Amino Acid
  misc_feature (12)..(12): Xaa can be any naturally occurring amino acid
  misc_feature (15)..(15): Xaa can be any naturally occurring amino acid
CCXEYCCNPXAXCTXGCY

SEQ ID NO: 2102 - protein, 18 aa, Artificial Sequence
  Synthetically generated peptide
  VARIANT (3)..(10): Xaa = Any Amino Acid
  misc_feature (12)..(12): Xaa can be any naturally occurring amino acid
  misc_feature (16)..(16): Xaa can be any naturally occurring amino acid
CCXEYCCNPXAXCTGXCY

SEQ ID NO: 2103 - protein, 18 aa, Artificial Sequence
  Synthetically generated peptide
  VARIANT (3)..(10): Xaa = Any Amino Acid
  misc_feature (12)..(12): Xaa can be any naturally occurring amino acid
  misc_feature (17)..(17): Xaa can be any naturally occurring amino acid
CCXEYCCNPXAXCTGCXY

SEQ ID NO: 2104 - protein, 17 aa, Artificial Sequence
  Synthetically generated peptide
  VARIANT (3)..(10): Xaa = Any Amino Acid
  misc_feature (13)..(13): Xaa can be any naturally occurring amino acid
CCXEYCCNPXACXTGCY

SEQ ID NO: 2105 - protein, 18 aa, Artificial Sequence
  Synthetically generated peptide
  VARIANT (3)..(10): Xaa = Any Amino Acid
  misc_feature (13)..(14): Xaa can be any naturally occurring amino acid
CCXEYCCNPXACXXTGCY

SEQ ID NO: 2106 - protein, 18 aa, Artificial Sequence
  Synthetically generated peptide
  VARIANT (3)..(10): Xaa = Any Amino Acid
  misc_feature (13)..(13): Xaa can be any naturally occurring amino acid
  misc_feature (15)..(15): Xaa can be any naturally occurring amino acid
CCXEYCCNPXACXTXGCY

SEQ ID NO: 2107 - protein, 18 aa, Artificial Sequence
  Synthetically generated peptide
  VARIANT (3)..(10): Xaa = Any Amino Acid
  misc_feature (13)..(13): Xaa can be any naturally occurring amino acid
  misc_feature (16)..(16): Xaa can be any naturally occurring amino acid
CCXEYCCNPXACXTGXCY

SEQ ID NO: 2108 - protein, 18 aa, Artificial Sequence
  Synthetically generated peptide
  VARIANT (3)..(10): Xaa = Any Amino Acid
  misc_feature (13)..(13): Xaa can be any naturally occurring amino acid
  misc_feature (17)..(17): Xaa can be any naturally occurring amino acid
CCXEYCCNPXACXTGCXY

SEQ ID NO: 2109 - protein, 17 aa, Artificial Sequence
  Synthetically generated peptide
  VARIANT (3)..(10): Xaa = Any Amino Acid
  misc_feature (14)..(14): Xaa can be any naturally occurring amino acid
CCXEYCCNPXACTXGCY

SEQ ID NO: 2110 - protein, 18 aa, Artificial Sequence
  Synthetically generated peptide
  VARIANT (3)..(10): Xaa = Any Amino Acid
  misc_feature (14)..(15): Xaa can be any naturally occurring amino acid
CCXEYCCNPXACTXXGCY

SEQ ID NO: 2111 - protein, 18 aa, Artificial Sequence
  Synthetically generated peptide
  VARIANT (3)..(10): Xaa = Any Amino Acid
  misc_feature (14)..(14): Xaa can be any naturally occurring amino acid
  misc_feature (16)..(16): Xaa can be any naturally occurring amino acid
CCXEYCCNPXACTXGXCY

SEQ ID NO: 2112 - protein, 18 aa, Artificial Sequence
  Synthetically generated peptide
  VARIANT (3)..(10): Xaa = Any Amino Acid
  misc_feature (14)..(14): Xaa can be any naturally occurring amino acid
  misc_feature (17)..(17): Xaa can be any naturally occurring amino acid
CCXEYCCNPXACTXGCXY

SEQ ID NO: 2113 - protein, 17 aa, Artificial Sequence
  Synthetically generated peptide
  VARIANT (3)..(10): Xaa = Any Amino Acid
  misc_feature (15)..(15): Xaa can be any naturally occurring amino acid
CCXEYCCNPXACTGXCY

SEQ ID NO: 2114 - protein, 18 aa, Artificial Sequence
  Synthetically generated peptide
  VARIANT (3)..(10): Xaa = Any Amino Acid
  misc_feature (15)..(16): Xaa can be any naturally occurring amino acid
CCXEYCCNPXACTGXXCY

SEQ ID NO: 2115 - protein, 18 aa, Artificial Sequence
  Synthetically generated peptide
  VARIANT (3)..(10): Xaa = Any Amino Acid
  misc_feature (15)..(15): Xaa can be any naturally occurring amino acid
  misc_feature (17)..(17): Xaa can be any naturally occurring amino acid
CCXEYCCNPXACTGXCXY

SEQ ID NO: 2116 - protein, 17 aa, Artificial Sequence
  Synthetically generated peptide
  VARIANT (3)..(10): Xaa = Any Amino Acid
  misc_feature (16)..(16): Xaa can be any naturally occurring amino acid
CCXEYCCNPXACTGCXY

SEQ ID NO: 2117 - protein, 18 aa, Artificial Sequence
  Synthetically generated peptide
  VARIANT (4)..(5): Xaa = Any Amino Acid
  misc_feature (9)..(10): Xaa can be any naturally occurring amino acid
CCEXXYCCXXNPACTGCY

SEQ ID NO: 2118 - protein, 18 aa, Artificial Sequence
  Synthetically generated peptide
  VARIANT (4)..(5): Xaa = Any Amino Acid
  misc_feature (9)..(9): Xaa can be any naturally occurring amino acid
  misc_feature (11)..(11): Xaa can be any naturally occurring amino acid
CCEXXYCCXNXPACTGCY

SEQ ID NO: 2119 - protein, 18 aa, Artificial Sequence
  Synthetically generated peptide
  VARIANT (4)..(5): Xaa = Any Amino Acid
  misc_feature (9)..(9): Xaa can be any naturally occurring amino acid
  misc_feature (12)..(12): Xaa can be any naturally occurring amino acid
CCEXXYCCXNPXACTGCY

SEQ ID NO: 2120 - protein, 18 aa, Artificial Sequence
  Synthetically generated peptide
  VARIANT (4)..(5): Xaa = Any Amino Acid
  misc_feature (9)..(9): Xaa can be any naturally occurring amino acid
  misc_feature (13)..(13): Xaa can be any naturally occurring amino acid
CCEXXYCCXNPAXCTGCY

SEQ ID NO: 2121 - protein, 18 aa, Artificial Sequence
  Synthetically generated peptide
  VARIANT (4)..(5): Xaa = Any Amino Acid
  misc_feature (9)..(9): Xaa can be any naturally occurring amino acid
  misc_feature (14)..(14): Xaa can be any naturally occurring amino acid
CCEXXYCCXNPACXTGCY

SEQ ID NO: 2122 - protein, 18 aa, Artificial Sequence
  Synthetically generated peptide
  VARIANT (4)..(5): Xaa = Any Amino Acid
  misc_feature (9)..(9): Xaa can be any naturally occurring amino acid
  misc_feature (15)..(15): Xaa can be any naturally occurring amino acid
CCEXXYCCXNPACTXGCY

SEQ ID NO: 2123 - protein, 18 aa, Artificial Sequence
  Synthetically generated peptide
  VARIANT (4)..(5): Xaa = Any Amino Acid
  misc_feature (9)..(9): Xaa can be any naturally occurring amino acid
  misc_feature (16)..(16): Xaa can be any naturally occurring amino acid
CCEXXYCCXNPACTGXCY

SEQ ID NO: 2124 - protein, 18 aa, Artificial Sequence
  Synthetically generated peptide
  VARIANT (4)..(5): Xaa = Any Amino Acid
  misc_feature (9)..(9): Xaa can be any naturally occurring amino acid
  misc_feature (17)..(17): Xaa can be any naturally occurring amino acid
CCEXXYCCXNPACTGCXY

SEQ ID NO: 2125 - protein, 17 aa, Artificial Sequence
  Synthetically generated peptide
  VARIANT (4)..(5): Xaa = Any Amino Acid
  misc_feature (10)..(10): Xaa can be any naturally occurring amino acid
CCEXXYCCNXPACTGCY

SEQ ID NO: 2126 - protein, 18 aa, Artificial Sequence
  Synthetically generated peptide
  VARIANT (4)..(5): Xaa = Any Amino Acid
  misc_feature (10)..(11): Xaa can be any naturally occurring amino acid
CCEXXYCCNXXPACTGCY

SEQ ID NO: 2127 - protein, 18 aa, Artificial Sequence
  Synthetically generated peptide
  VARIANT (4)..(5): Xaa = Any Amino Acid
  misc_feature (10)..(10): Xaa can be any naturally occurring amino acid
  misc_feature (12)..(12): Xaa can be any naturally occurring amino acid
CCEXXYCCNXPXACTGCY

SEQ ID NO: 2128 - protein, 18 aa, Artificial Sequence
  Synthetically generated peptide
  VARIANT (4)..(5): Xaa = Any Amino Acid
  misc_feature (10)..(10): Xaa can be any naturally occurring amino acid
  misc_feature (13)..(13): Xaa can be any naturally occurring amino acid
CCEXXYCCNXPAXCTGCY

SEQ ID NO: 2129 - protein, 18 aa, Artificial Sequence
  Synthetically generated peptide
  VARIANT (4)..(5): Xaa = Any Amino Acid
  misc_feature (10)..(10): Xaa can be any naturally occurring amino acid
  misc_feature (14)..(14): Xaa can be any naturally occurring amino acid
CCEXXYCCNXPACXTGCY

SEQ ID NO: 2130 - protein, 18 aa, Artificial Sequence
  Synthetically generated peptide
  VARIANT (4)..(5): Xaa = Any Amino Acid
  misc_feature (10)..(10): Xaa can be any naturally occurring amino acid
  misc_feature (15)..(15): Xaa can be any naturally occurring amino acid
CCEXXYCCNXPACTXGCY

SEQ ID NO: 2131 - protein, 18 aa, Artificial Sequence
  Synthetically generated peptide
  VARIANT (4)..(5): Xaa = Any Amino Acid
  misc_feature (10)..(10): Xaa can be any naturally occurring amino acid
  misc_feature (16)..(16): Xaa can be any naturally occurring amino acid
CCEXXYCCNXPACTGXCY

SEQ ID NO: 2132 - protein, 18 aa, Artificial Sequence
  Synthetically generated peptide
  VARIANT (4)..(5): Xaa = Any Amino Acid
  misc_feature (10)..(10): Xaa can be any naturally occurring amino acid
  misc_feature (17)..(17): Xaa can be any naturally occurring amino acid
CCEXXYCCNXPACTGCXY

SEQ ID NO: 2133 - protein, 17 aa, Artificial Sequence
  Synthetically generated peptide
  VARIANT (4)..(5): Xaa = Any Amino Acid
  misc_feature (11)..(11): Xaa can be any naturally occurring amino acid
CCEXXYCCNPXACTGCY

SEQ ID NO: 2134 - protein, 18 aa, Artificial Sequence
  Synthetically generated peptide
  VARIANT (4)..(5): Xaa = Any Amino Acid
  misc_feature (11)..(12): Xaa can be any naturally occurring amino acid
CCEXXYCCNPXXACTGCY

SEQ ID NO: 2135 - protein, 18 aa, Artificial Sequence
  Synthetically generated peptide
  VARIANT (4)..(5): Xaa = Any Amino Acid
  misc_feature (11)..(11): Xaa can be any naturally occurring amino acid
  misc_feature (13)..(13): Xaa can be any naturally occurring amino acid
CCEXXYCCNPXAXCTGCY

SEQ ID NO: 2136 - protein, 18 aa, Artificial Sequence
  Synthetically generated peptide
  VARIANT (4)..(5): Xaa = Any Amino Acid
  misc_feature (11)..(11): Xaa can be any naturally occurring amino acid
  misc_feature (14)..(14): Xaa can be any naturally occurring amino acid
CCEXXYCCNPXACXTGCY

SEQ ID NO: 2137 - protein, 18 aa, Artificial Sequence
  Synthetically generated peptide
  VARIANT (4)..(5): Xaa = Any Amino Acid
  misc_feature (11)..(11): Xaa can be any naturally occurring amino acid
  misc_feature (15)..(15): Xaa can be any naturally occurring amino acid
CCEXXYCCNPXACTXGCY

SEQ ID NO: 2138 - protein, 18 aa, Artificial Sequence
  Synthetically generated peptide
  VARIANT (4)..(5): Xaa = Any Amino Acid
  misc_feature (11)..(11): Xaa can be any naturally occurring amino acid
  misc_feature (16)..(16): Xaa can be any naturally occurring amino acid
CCEXXYCCNPXACTGXCY

SEQ ID NO: 2139 - protein, 18 aa, Artificial Sequence
  Synthetically generated peptide
  VARIANT (4)..(5): Xaa = Any Amino Acid
  misc_feature (11)..(11): Xaa can be any naturally occurring amino acid
  misc_feature (17)..(17): Xaa can be any naturally occurring amino acid
CCEXXYCCNPXACTGCXY

SEQ ID NO: 2140 - protein, 17 aa, Artificial Sequence
  Synthetically generated peptide
  VARIANT (4)..(5): Xaa = Any Amino Acid
  misc_feature (12)..(12): Xaa can be any naturally occurring amino acid
CCEXXYCCNPAXCTGCY

SEQ ID NO: 2141 - protein, 18 aa, Artificial Sequence
  Synthetically generated peptide
  VARIANT (4)..(5): Xaa = Any Amino Acid
  misc_feature (12)..(13): Xaa can be any naturally occurring amino acid
CCEXXYCCNPAXXCTGCY

SEQ ID NO: 2142 - protein, 18 aa, Artificial Sequence
  Synthetically generated peptide
  VARIANT (4)..(5): Xaa = Any Amino Acid
  misc_feature (12)..(12): Xaa can be any naturally occurring amino acid
  misc_feature (14)..(14): Xaa can be any naturally occurring amino acid
CCEXXYCCNPAXCXTGCY

SEQ ID NO: 2143 - protein, 18 aa, Artificial Sequence
  Synthetically generated peptide
  VARIANT (4)..(5): Xaa = Any Amino Acid
  misc_feature (12)..(12): Xaa can be any naturally occurring amino acid
  misc_feature (15)..(15): Xaa can be any naturally occurring amino acid
CCEXXYCCNPAXCTXGCY

SEQ ID NO: 2144 - protein, 18 aa, Artificial Sequence
  Synthetically generated peptide
  VARIANT (4)..(5): Xaa = Any Amino Acid
  misc_feature (12)..(12): Xaa can be any naturally occurring amino acid
  misc_feature (16)..(16): Xaa can be any naturally occurring amino acid
CCEXXYCCNPAXCTGXCY

SEQ ID NO: 2145 - protein, 18 aa, Artificial Sequence
  Synthetically generated peptide
  VARIANT (4)..(5): Xaa = Any Amino Acid
  misc_feature (12)..(12): Xaa can be any naturally occurring amino acid
  misc_feature (17)..(17): Xaa can be any naturally occurring amino acid
CCEXXYCCNPAXCTGCXY

SEQ ID NO: 2146 - protein, 17 aa, Artificial Sequence
  Synthetically generated peptide
  VARIANT (4)..(5): Xaa = Any Amino Acid
  misc_feature (13)..(13): Xaa can be any naturally occurring amino acid
CCEXXYCCNPACXTGCY

SEQ ID NO: 2147 - protein, 18 aa, Artificial Sequence
  Synthetically generated peptide
  VARIANT (4)..(5): Xaa = Any Amino Acid
  misc_feature (13)..(14): Xaa can be any naturally occurring amino acid
CCEXXYCCNPACXXTGCY

SEQ ID NO: 2148 - protein, 18 aa, Artificial Sequence
  Synthetically generated peptide
  VARIANT (4)..(5): Xaa = Any Amino Acid
  misc_feature (13)..(13): Xaa can be any naturally occurring amino acid
  misc_feature (15)..(15): Xaa can be any naturally occurring amino acid
CCEXXYCCNPACXTXGCY

SEQ ID NO: 2149 - protein, 18 aa, Artificial Sequence
  Synthetically generated peptide
  VARIANT (4)..(5): Xaa = Any Amino Acid
  misc_feature (13)..(13): Xaa can be any naturally occurring amino acid
  misc_feature (16)..(16): Xaa can be any naturally occurring amino acid
CCEXXYCCNPACXTGXCY

SEQ ID NO: 2150 - protein, 18 aa, Artificial Sequence
  Synthetically generated peptide
  VARIANT (4)..(5): Xaa = Any Amino Acid
  misc_feature (13)..(13): Xaa can be any naturally occurring amino acid
  misc_feature (17)..(17): Xaa can be any naturally occurring amino acid
CCEXXYCCNPACXTGCXY

SEQ ID NO: 2151 - protein, 17 aa, Artificial Sequence
  Synthetically generated peptide
  VARIANT (4)..(5): Xaa = Any Amino Acid
  misc_feature (14)..(14): Xaa can be any naturally occurring amino acid
CCEXXYCCNPACTXGCY

SEQ ID NO: 2152 - protein, 18 aa, Artificial Sequence
  Synthetically generated peptide
  VARIANT (4)..(5): Xaa = Any Amino Acid
  misc_feature (14)..(15): Xaa can be any naturally occurring amino acid
CCEXXYCCNPACTXXGCY

SEQ ID NO: 2153 - protein, 18 aa, Artificial Sequence
  Synthetically generated peptide
  VARIANT (4)..(5): Xaa = Any Amino Acid
  misc_feature (14)..(14): Xaa can be any naturally occurring amino acid
  misc_feature (16)..(16): Xaa can be any naturally occurring amino acid
CCEXXYCCNPACTXGXCY

SEQ ID NO: 2154 - protein, 18 aa, Artificial Sequence
  Synthetically generated peptide
  VARIANT (4)..(5): Xaa = Any Amino Acid
  misc_feature (14)..(14): Xaa can be any naturally occurring amino acid
  misc_feature (17)..(17): Xaa can be any naturally occurring amino acid
CCEXXYCCNPACTXGCXY

SEQ ID NO: 2155 - protein, 17 aa, Artificial Sequence
  Synthetically generated peptide
  VARIANT (4)..(5): Xaa = Any Amino Acid
  misc_feature (15)..(15): Xaa can be any naturally occurring amino acid
CCEXXYCCNPACTGXCY

SEQ ID NO: 2156 - protein, 18 aa, Artificial Sequence
  Synthetically generated peptide
  VARIANT (4)..(5): Xaa = Any Amino Acid
  misc_feature (15)..(16): Xaa can be any naturally occurring amino acid
CCEXXYCCNPACTGXXCY

SEQ ID NO: 2157 - protein, 18 aa, Artificial Sequence
  Synthetically generated peptide
  VARIANT (4)..(5): Xaa = Any Amino Acid
  misc_feature (15)..(15): Xaa can be any naturally occurring amino acid
  misc_feature (17)..(17): Xaa can be any naturally occurring amino acid
CCEXXYCCNPACTGXCXY

SEQ ID NO: 2158 - protein, 17 aa, Artificial Sequence
  Synthetically generated peptide
  VARIANT (4)..(5): Xaa = Any Amino Acid
  misc_feature (16)..(16): Xaa can be any naturally occurring amino acid
CCEXXYCCNPACTGCXY

SEQ ID NO: 2159 - protein, 18 aa, Artificial Sequence
  Synthetically generated peptide
  VARIANT (4)..(5): Xaa = Any Amino Acid
  misc_feature (16)..(17): Xaa can be any naturally occurring amino acid
CCEXXYCCNPACTGCXXY

SEQ ID NO: 2160 - protein, 16 aa, Artificial Sequence
  Synthetically generated peptide
  VARIANT (4)..(6): Xaa = Any Amino Acid
CCEXYXCCNPACTGCY

SEQ ID NO: 2161 - protein, 17 aa, Artificial Sequence
  Synthetically generated peptide
  VARIANT (4)..(6): Xaa = Any Amino Acid
  misc_feature (7)..(7): Xaa can be any naturally occurring amino acid
CCEXYXXCCNPACTGCY

SEQ ID NO: 2162 - protein, 18 aa, Artificial Sequence
  Synthetically generated peptide
  VARIANT (4)..(6): Xaa = Any Amino Acid
  misc_feature (7)..(8): Xaa can be any naturally occurring amino acid
CCEXYXXXCCNPACTGCY

SEQ ID NO: 2163 - protein, 18 aa, Artificial Sequence
  Synthetically generated peptide
  VARIANT (4)..(6): Xaa = Any Amino Acid
  misc_feature (7)..(7): Xaa can be any naturally occurring amino acid
  misc_feature (10)..(10): Xaa can be any naturally occurring amino acid
CCEXYXXCCXNPACTGCY

SEQ ID NO: 2164 - protein, 18 aa, Artificial Sequence
  Synthetically generated peptide
  VARIANT (4)..(6): Xaa = Any Amino Acid
  misc_feature (7)..(7): Xaa can be any naturally occurring amino acid
  misc_feature (11)..(11): Xaa can be any naturally occurring amino acid
CCEXYXXCCNXPACTGCY

SEQ ID NO: 2165 - protein, 18 aa, Artificial Sequence
  Synthetically generated peptide
  VARIANT (4)..(6): Xaa = Any Amino Acid
  misc_feature (7)..(7): Xaa can be any naturally occurring amino acid
  misc_feature (12)..(12): Xaa can be any naturally occurring amino acid
CCEXYXXCCNPXACTGCY

SEQ ID NO: 2166 - protein, 18 aa, Artificial Sequence
  Synthetically generated peptide
  VARIANT (4)..(6): Xaa = Any Amino Acid
  misc_feature (7)..(7): Xaa can be any naturally occurring amino acid
  misc_feature (13)..(13): Xaa can be any naturally occurring amino acid
CCEXYXXCCNPAXCTGCY

SEQ ID NO: 2167 - protein, 18 aa, Artificial Sequence
  Synthetically generated peptide
  VARIANT (4)..(6): Xaa = Any Amino Acid
  misc_feature (7)..(7): Xaa can be any naturally occurring amino acid
  misc_feature (14)..(14): Xaa can be any naturally occurring amino acid
CCEXYXXCCNPACXTGCY

SEQ ID NO: 2168 - protein, 18 aa, Artificial Sequence
  Synthetically generated peptide
  VARIANT (4)..(6): Xaa = Any Amino Acid
  misc_feature (7)..(7): Xaa can be any naturally occurring amino acid
  misc_feature (15)..(15): Xaa can be any naturally occurring amino acid
CCEXYXXCCNPACTXGCY

SEQ ID NO: 2169 - protein, 18 aa, Artificial Sequence
  Synthetically generated peptide
  VARIANT (4)..(6): Xaa = Any Amino Acid
  misc_feature (7)..(7): Xaa can be any naturally occurring amino acid
  misc_feature (16)..(16): Xaa can be any naturally occurring amino acid
CCEXYXXCCNPACTGXCY

SEQ ID NO: 2170 - protein, 18 aa, Artificial Sequence
  Synthetically generated peptide
  VARIANT (4)..(6): Xaa = Any Amino Acid
  misc_feature (7)..(7): Xaa can be any naturally occurring amino acid
  misc_feature (17)..(17): Xaa can be any naturally occurring amino acid
CCEXYXXCCNPACTGCXY

SEQ ID NO: 2171 - protein, 17 aa, Artificial Sequence
  Synthetically generated peptide
  VARIANT (4)..(6): Xaa = Any Amino Acid
  misc_feature (9)..(9): Xaa can be any naturally occurring amino acid
CCEXYXCCXNPACTGCY

SEQ ID NO: 2172 - protein, 18 aa, Artificial Sequence
  Synthetically generated peptide
  VARIANT (4)..(6): Xaa = Any Amino Acid
  misc_feature (9)..(10): Xaa can be any naturally occurring amino acid
CCEXYXCCXXNPACTGCY

SEQ ID NO: 2173 - protein, 18 aa, Artificial Sequence
  Synthetically generated peptide
  VARIANT (4)..(6): Xaa = Any Amino Acid
  misc_feature (9)..(9): Xaa can be any naturally occurring amino acid
  misc_feature (11)..(11): Xaa can be any naturally occurring amino acid
CCEXYXCCXNXPACTGCY

SEQ ID NO: 2174 - protein, 18 aa, Artificial Sequence
  Synthetically generated peptide
  VARIANT (4)..(6): Xaa = Any Amino Acid
  misc_feature (9)..(9): Xaa can be any naturally occurring amino acid
  misc_feature (12)..(12): Xaa can be any naturally occurring amino acid
CCEXYXCCXNPXACTGCY

SEQ ID NO: 2175 - protein, 18 aa, Artificial Sequence
  Synthetically generated peptide
  VARIANT (4)..(6): Xaa = Any Amino Acid
  misc_feature (9)..(9): Xaa can be any naturally occurring amino acid
  misc_feature (13)..(13): Xaa can be any naturally occurring amino acid
CCEXYXCCXNPAXCTGCY

SEQ ID NO: 2176 - protein, 18 aa, Artificial Sequence
  Synthetically generated peptide
  VARIANT (4)..(6): Xaa = Any Amino Acid
  misc_feature (9)..(9): Xaa can be any naturally occurring amino acid
  misc_feature (14)..(14): Xaa can be any naturally occurring amino acid
CCEXYXCCXNPACXTGCY

SEQ ID NO: 2177 - protein, 18 aa, Artificial Sequence
  Synthetically generated peptide
  VARIANT (4)..(6): Xaa = Any Amino Acid
  misc_feature (9)..(9): Xaa can be any naturally occurring amino acid
  misc_feature (15)..(15): Xaa can be any naturally occurring amino acid
CCEXYXCCXNPACTXGCY

SEQ ID NO: 2178 - protein, 18 aa, Artificial Sequence
  Synthetically generated peptide
  VARIANT (4)..(6): Xaa = Any Amino Acid
  misc_feature (9)..(9): Xaa can be any naturally occurring amino acid
  misc_feature (16)..(16): Xaa can be any naturally occurring amino acid
CCEXYXCCXNPACTGXCY

SEQ ID NO: 2179 - protein, 18 aa, Artificial Sequence
  Synthetically generated peptide
  VARIANT (4)..(6): Xaa = Any Amino Acid
  misc_feature (9)..(9): Xaa can be any naturally occurring amino acid
  misc_feature (17)..(17): Xaa can be any naturally occurring amino acid
CCEXYXCCXNPACTGCXY

SEQ ID NO: 2180 - protein, 17 aa, Artificial Sequence
  Synthetically generated peptide
  VARIANT (4)..(6): Xaa = Any Amino Acid
  misc_feature (10)..(10): Xaa can be any naturally occurring amino acid
CCEXYXCCNXPACTGCY

SEQ ID NO: 2181 - protein, 18 aa, Artificial Sequence
  Synthetically generated peptide
  VARIANT (4)..(6): Xaa = Any Amino Acid
  misc_feature (10)..(11): Xaa can be any naturally occurring amino acid
CCEXYXCCNXXPACTGCY

SEQ ID NO: 2182 - protein, 18 aa, Artificial Sequence
  Synthetically generated peptide
  VARIANT (4)..(6): Xaa = Any Amino Acid
  misc_feature (10)..(10): Xaa can be any naturally occurring amino acid
  misc_feature (12)..(12): Xaa can be any naturally occurring amino acid
CCEXYXCCNXPXACTGCY

SEQ ID NO: 2183 - protein, 18 aa, Artificial Sequence
  Synthetically generated peptide
  VARIANT (4)..(6): Xaa = Any Amino Acid
  misc_feature (10)..(10): Xaa can be any naturally occurring amino acid
  misc_feature (13)..(13): Xaa can be any naturally occurring amino acid
CCEXYXCCNXPAXCTGCY

SEQ ID NO: 2184 - protein, 18 aa, Artificial Sequence
  Synthetically generated peptide
  VARIANT (4)..(6): Xaa = Any Amino Acid
  misc_feature (10)..(10): Xaa can be any naturally occurring amino acid
  misc_feature (14)..(14): Xaa can be any naturally occurring amino acid
CCEXYXCCNXPACXTGCY

SEQ ID NO: 2185 - protein, 18 aa, Artificial Sequence
  Synthetically generated peptide
  VARIANT (4)..(6): Xaa = Any Amino Acid
  misc_feature (10)..(10): Xaa can be any naturally occurring amino acid
  misc_feature (15)..(15): Xaa can be any naturally occurring amino acid
CCEXYXCCNXPACTXGCY

SEQ ID NO: 2186 - protein, 18 aa, Artificial Sequence
  Synthetically generated peptide
  VARIANT (4)..(6): Xaa = Any Amino Acid
  misc_feature (10)..(10): Xaa can be any naturally occurring amino acid
  misc_feature (16)..(16): Xaa can be any naturally occurring amino acid
CCEXYXCCNXPACTGXCY

SEQ ID NO: 2187 - protein, 18 aa, Artificial Sequence
  Synthetically generated peptide
  VARIANT (4)..(6): Xaa = Any Amino Acid
  misc_feature (10)..(10): Xaa can be any naturally occurring amino acid
  misc_feature (17)..(17): Xaa can be any naturally occurring amino acid
CCEXYXCCNXPACTGCXY

SEQ ID NO: 2188 - protein, 17 aa, Artificial Sequence
  Synthetically generated peptide
  VARIANT (4)..(6): Xaa = Any Amino Acid
  misc_feature (11)..(11): Xaa can be any naturally occurring amino acid
CCEXYXCCNPXACTGCY

SEQ ID NO: 2189 - protein, 18 aa, Artificial Sequence
  Synthetically generated peptide
  VARIANT (4)..(6): Xaa = Any Amino Acid
  misc_feature (11)..(12): Xaa can be any naturally occurring amino acid
CCEXYXCCNPXXACTGCY

SEQ ID NO: 2190 - protein, 18 aa, Artificial Sequence
  Synthetically generated peptide
  VARIANT (4)..(6): Xaa = Any Amino Acid
  misc_feature (11)..(11): Xaa can be any naturally occurring amino acid
  misc_feature (13)..(13): Xaa can be any naturally occurring amino acid
CCEXYXCCNPXAXCTGCY

SEQ ID NO: 2191 - protein, 18 aa, Artificial Sequence
  Synthetically generated peptide
  VARIANT (4)..(6): Xaa = Any Amino Acid
  misc_feature (11)..(11): Xaa can be any naturally occurring amino acid
  misc_feature (14)..(14): Xaa can be any naturally occurring amino acid
CCEXYXCCNPXACXTGCY

SEQ ID NO: 2192 - protein, 18 aa, Artificial Sequence
  Synthetically generated peptide
  VARIANT (4)..(6): Xaa = Any Amino Acid
  misc_feature (11)..(11): Xaa can be any naturally occurring amino acid
  misc_feature (15)..(15): Xaa can be any naturally occurring amino acid
CCEXYXCCNPXACTXGCY

SEQ ID NO: 2193 - protein, 18 aa, Artificial Sequence
  Synthetically generated peptide
  VARIANT (4)..(6): Xaa = Any Amino Acid
  misc_feature (11)..(11): Xaa can be any naturally occurring amino acid
  misc_feature (16)..(16): Xaa can be any naturally occurring amino acid
CCEXYXCCNPXACTGXCY

SEQ ID NO: 2194 - protein, 18 aa, Artificial Sequence
  Synthetically generated peptide
  VARIANT (4)..(6): Xaa = Any Amino Acid
  misc_feature (11)..(11): Xaa can be any naturally occurring amino acid
  misc_feature (17)..(17): Xaa can be any naturally occurring amino acid
CCEXYXCCNPXACTGCXY

SEQ ID NO: 2195 - protein, 17 aa, Artificial Sequence
  Synthetically generated peptide
  VARIANT (4)..(6): Xaa = Any Amino Acid
  misc_feature (12)..(12): Xaa can be any naturally occurring amino acid
CCEXYXCCNPAXCTGCY

SEQ ID NO: 2196 - protein, 18 aa, Artificial Sequence
  Synthetically generated peptide
  VARIANT (4)..(6): Xaa = Any Amino Acid
  misc_feature (12)..(13): Xaa can be any naturally occurring amino acid
CCEXYXCCNPAXXCTGCY

SEQ ID NO: 2197 - protein, 18 aa, Artificial Sequence
  Synthetically generated peptide
  VARIANT (4)..(6): Xaa = Any Amino Acid
  misc_feature (12)..(12): Xaa can be any naturally occurring amino acid
  misc_feature (14)..(14): Xaa can be any naturally occurring amino acid
CCEXYXCCNPAXCXTGCY

SEQ ID NO: 2198 - protein, 18 aa, Artificial Sequence
  Synthetically generated peptide
  VARIANT (4)..(6): Xaa = Any Amino Acid
  misc_feature (12)..(12): Xaa can be any naturally occurring amino acid
  misc_feature (15)..(15): Xaa can be any naturally occurring amino acid
CCEXYXCCNPAXCTXGCY

SEQ ID NO: 2199 - protein, 18 aa, Artificial Sequence
  Synthetically generated peptide
  VARIANT (4)..(6): Xaa = Any Amino Acid
  misc_feature (12)..(12): Xaa can be any naturally occurring amino acid
  misc_feature (16)..(16): Xaa can be any naturally occurring amino acid
CCEXYXCCNPAXCTGXCY

SEQ ID NO: 2200 - protein, 18 aa, Artificial Sequence
  Synthetically generated peptide
  VARIANT (4)..(6): Xaa = Any Amino Acid
  misc_feature (12)..(12): Xaa can be any naturally occurring amino acid
  misc_feature (17)..(17): Xaa can be any naturally occurring amino acid
CCEXYXCCNPAXCTGCXY

SEQ ID NO: 2201 - protein, 17 aa, Artificial Sequence
  Synthetically generated peptide
  VARIANT (4)..(6): Xaa = Any Amino Acid
  misc_feature (13)..(13): Xaa can be any naturally occurring amino acid
CCEXYXCCNPACXTGCY

SEQ ID NO: 2202 - protein, 18 aa, Artificial Sequence
  Synthetically generated peptide
  VARIANT (4)..(6): Xaa = Any Amino Acid
  misc_feature (13)..(14): Xaa can be any naturally occurring amino acid
CCEXYXCCNPACXXTGCY

SEQ ID NO: 2203 - protein, 18 aa, Artificial Sequence
  Synthetically generated peptide
  VARIANT (4)..(6): Xaa = Any Amino Acid
  misc_feature (13)..(13): Xaa can be any naturally occurring amino acid
  misc_feature (15)..(15): Xaa can be any naturally occurring amino acid
CCEXYXCCNPACXTXGCY

SEQ ID NO: 2204 - protein, 18 aa, Artificial Sequence
  Synthetically generated peptide
  VARIANT (4)..(6): Xaa = Any Amino Acid
  misc_feature (13)..(13): Xaa can be any naturally occurring amino acid
  misc_feature (16)..(16): Xaa can be any naturally occurring amino acid
CCEXYXCCNPACXTGXCY

SEQ ID NO: 2205 - protein, 18 aa, Artificial Sequence
  Synthetically generated peptide
  VARIANT (4)..(6): Xaa = Any Amino Acid
  misc_feature (13)..(13): Xaa can be any naturally occurring amino acid
  misc_feature (17)..(17): Xaa can be any naturally occurring amino acid
CCEXYXCCNPACXTGCXY

SEQ ID NO: 2206 - protein, 17 aa, Artificial Sequence
  Synthetically generated peptide
  VARIANT (4)..(6): Xaa = Any Amino Acid
  misc_feature (14)..(14): Xaa can be any naturally occurring amino acid
CCEXYXCCNPACTXGCY

SEQ ID NO: 2207 - protein, 18 aa, Artificial Sequence
  Synthetically generated peptide
  VARIANT (4)..(6): Xaa = Any Amino Acid
  misc_feature (14)..(15): Xaa can be any naturally occurring amino acid
CCEXYXCCNPACTXXGCY

SEQ ID NO: 2208 - protein, 18 aa, Artificial Sequence
  Synthetically generated peptide
  VARIANT (4)..(6): Xaa = Any Amino Acid
  misc_feature (14)..(14): Xaa can be any naturally occurring amino acid
  misc_feature (16)..(16): Xaa can be any naturally occurring amino acid
CCEXYXCCNPACTXGXCY

SEQ ID NO: 2209 - protein, 18 aa, Artificial Sequence
  Synthetically generated peptide
  VARIANT (4)..(6): Xaa = Any Amino Acid
  misc_feature (14)..(14): Xaa can be any naturally occurring amino acid
  misc_feature (17)..(17): Xaa can be any naturally occurring amino acid
CCEXYXCCNPACTXGCXY

SEQ ID NO: 2210 - protein, 17 aa, Artificial Sequence
  Synthetically generated peptide
  VARIANT (4)..(6): Xaa = Any Amino Acid
  misc_feature (15)..(15): Xaa can be any naturally occurring amino acid
CCEXYXCCNPACTGXCY

SEQ ID NO: 2211 - protein, 18 aa, Artificial Sequence
  Synthetically generated peptide
  VARIANT (4)..(6): Xaa = Any Amino Acid
  misc_feature (15)..(16): Xaa can be any naturally occurring amino acid
CCEXYXCCNPACTGXXCY

SEQ ID NO: 2212 - protein, 18 aa, Artificial Sequence
  Synthetically generated peptide
  VARIANT (4)..(6): Xaa = Any Amino Acid
  misc_feature (15)..(15): Xaa can be any naturally occurring amino acid
  misc_feature (17)..(17): Xaa can be any naturally occurring amino acid
CCEXYXCCNPACTGXCXY

SEQ ID NO: 2213 - protein, 17 aa, Artificial Sequence
  Synthetically generated peptide
  VARIANT (4)..(6): Xaa = Any Amino Acid
  misc_feature (16)..(16): Xaa can be any naturally occurring amino acid
CCEXYXCCNPACTGCXY

SEQ ID NO: 2214 - protein, 18 aa, Artificial Sequence
  Synthetically generated peptide
  VARIANT (4)..(6): Xaa = Any Amino Acid
  misc_feature (16)..(17): Xaa can be any naturally occurring amino acid
CCEXYXCCNPACTGCXXY

SEQ ID NO: 2215 - protein, 16 aa, Artificial Sequence
  Synthetically generated peptide
  VARIANT (4)..(8): Xaa = Any Amino Acid
CCEXYCCXNPACTGCY

SEQ ID NO: 2216 - protein, 17 aa, Artificial Sequence
  Synthetically generated peptide
  VARIANT (4)..(8): Xaa = Any Amino Acid
  misc_feature (9)..(9): Xaa can be any naturally occurring amino acid
CCEXYCCXXNPACTGCY

SEQ ID NO: 2217 - protein, 18 aa, Artificial Sequence
  Synthetically generated peptide
  VARIANT (4)..(8): Xaa = Any Amino Acid
  misc_feature (9)..(10): Xaa can be any naturally occurring amino acid
CCEXYCCXXXNPACTGCY

SEQ ID NO: 2218 - protein, 18 aa, Artificial Sequence
  Synthetically generated peptide
  VARIANT (4)..(8): Xaa = Any Amino Acid
  misc_feature (9)..(9): Xaa can be any naturally occurring amino acid
  misc_feature (11)..(11): Xaa can be any naturally occurring amino acid
CCEXYCCXXNXPACTGCY

SEQ ID NO: 2219 - protein, 18 aa, Artificial Sequence
  Synthetically generated peptide
  VARIANT (4)..(8): Xaa = Any Amino Acid
  misc_feature (9)..(9): Xaa can be any naturally occurring amino acid
  misc_feature (12)..(12): Xaa can be any naturally occurring amino acid
CCEXYCCXXNPXACTGCY

SEQ ID NO: 2220 - protein, 18 aa, Artificial Sequence
  Synthetically generated peptide
  VARIANT (4)..(8): Xaa = Any Amino Acid
  misc_feature (9)..(9): Xaa can be any naturally occurring amino acid
  misc_feature (13)..(13): Xaa can be any naturally occurring amino acid
CCEXYCCXXNPAXCTGCY

SEQ ID NO: 2221 - protein, 18 aa, Artificial Sequence
  Synthetically generated peptide
  VARIANT (4)..(8): Xaa = Any Amino Acid
  misc_feature (9)..(9): Xaa can be any naturally occurring amino acid
  misc_feature (14)..(14): Xaa can be any naturally occurring amino acid
CCEXYCCXXNPACXTGCY

SEQ ID NO: 2222 - protein, 18 aa, Artificial Sequence
  Synthetically generated peptide
  VARIANT (4)..(8): Xaa = Any Amino Acid
  misc_feature (9)..(9): Xaa can be any naturally occurring amino acid
  misc_feature (15)..(15): Xaa can be any naturally occurring amino acid
CCEXYCCXXNPACTXGCY

SEQ ID NO: 2223 - protein, 18 aa, Artificial Sequence
  Synthetically generated peptide
  VARIANT (4)..(8): Xaa = Any Amino Acid
  misc_feature (9)..(9): Xaa can be any naturally occurring amino acid
  misc_feature (16)..(16): Xaa can be any naturally occurring amino acid
CCEXYCCXXNPACTGXCY

SEQ ID NO: 2224 - protein, 18 aa, Artificial Sequence
  Synthetically generated peptide
  VARIANT (4)..(8): Xaa = Any Amino Acid
  misc_feature (9)..(9): Xaa can be any naturally occurring amino acid
  misc_feature (17)..(17): Xaa can be any naturally occurring amino acid
CCEXYCCXXNPACTGCXY

SEQ ID NO: 2225 - protein, 17 aa, Artificial Sequence
  Synthetically generated peptide
  VARIANT (4)..(8): Xaa = Any Amino Acid
  misc_feature (10)..(10): Xaa can be any naturally occurring amino acid
CCEXYCCXNXPACTGCY

SEQ ID NO: 2226 - protein, 18 aa, Artificial Sequence
  Synthetically generated peptide
  VARIANT (4)..(8): Xaa = Any Amino Acid
  misc_feature (10)..(11): Xaa can be any naturally occurring amino acid
CCEXYCCXNXXPACTGCY

SEQ ID NO: 2227 - protein, 18 aa, Artificial Sequence
  Synthetically generated peptide
  VARIANT (4)..(8): Xaa = Any Amino Acid
  misc_feature (10)..(10): Xaa can be any naturally occurring amino acid
  misc_feature (12)..(12): Xaa can be any naturally occurring amino acid
CCEXYCCXNXPXACTGCY

SEQ ID NO: 2228 - protein, 18 aa, Artificial Sequence
  Synthetically generated peptide
  VARIANT (4)..(8): Xaa = Any Amino Acid
  misc_feature (10)..(10): Xaa can be any naturally occurring amino acid
  misc_feature (13)..(13): Xaa can be any naturally occurring amino acid
CCEXYCCXNXPAXCTGCY

SEQ ID NO: 2229 - protein, 18 aa, Artificial Sequence
  Synthetically generated peptide
  VARIANT (4)..(8): Xaa = Any Amino Acid
  misc_feature (10)..(10): Xaa can be any naturally occurring amino acid
  misc_feature (14)..(14): Xaa can be any naturally occurring amino acid
CCEXYCCXNXPACXTGCY

SEQ ID NO: 2230 - protein, 18 aa, Artificial Sequence
  Synthetically generated peptide
  VARIANT (4)..(8): Xaa = Any Amino Acid
  misc_feature (10)..(10): Xaa can be any naturally occurring amino acid
  misc_feature (15)..(15): Xaa can be any naturally occurring amino acid
CCEXYCCXNXPACTXGCY

SEQ ID NO: 2231 - protein, 18 aa, Artificial Sequence
  Synthetically generated peptide
  VARIANT (4)..(8): Xaa = Any Amino Acid
  misc_feature (10)..(10): Xaa can be any naturally occurring amino acid
  misc_feature (16)..(16): Xaa can be any naturally occurring amino acid
CCEXYCCXNXPACTGXCY

SEQ ID NO: 2232 - protein, 18 aa, Artificial Sequence
  Synthetically generated peptide
  VARIANT (4)..(8): Xaa = Any Amino Acid
  misc_feature (10)..(10): Xaa can be any naturally occurring amino acid
  misc_feature (17)..(17): Xaa can be any naturally occurring amino acid
CCEXYCCXNXPACTGCXY

SEQ ID NO: 2233 - protein, 17 aa, Artificial Sequence
  Synthetically generated peptide
  VARIANT (4)..(8): Xaa = Any Amino Acid
  misc_feature (11)..(11): Xaa can be any naturally occurring amino acid
CCEXYCCXNPXACTGCY

SEQ ID NO: 2234 - protein, 18 aa, Artificial Sequence
  Synthetically generated peptide
  VARIANT (4)..(8): Xaa = Any Amino Acid
  misc_feature (11)..(12): Xaa can be any naturally occurring amino acid
CCEXYCCXNPXXACTGCY

SEQ ID NO: 2235 - protein, 18 aa, Artificial Sequence
  Synthetically generated peptide
  VARIANT (4)..(8): Xaa = Any Amino Acid
  misc_feature (11)..(11): Xaa can be any naturally occurring amino acid
  misc_feature (13)..(13): Xaa can be any naturally occurring amino acid
CCEXYCCXNPXAXCTGCY

SEQ ID NO: 2236 - protein, 18 aa, Artificial Sequence
  Synthetically generated peptide
  VARIANT (4)..(8): Xaa = Any Amino Acid
  misc_feature (11)..(11): Xaa can be any naturally occurring amino acid
  misc_feature (14)..(14): Xaa can be any naturally occurring amino acid
CCEXYCCXNPXACXTGCY

SEQ ID NO: 2237 - protein, 18 aa, Artificial Sequence
  Synthetically generated peptide
  VARIANT (4)..(8): Xaa = Any Amino Acid
  misc_feature (11)..(11): Xaa can be any naturally occurring amino acid
  misc_feature (15)..(15): Xaa can be any naturally occurring amino acid
CCEXYCCXNPXACTXGCY

SEQ ID NO: 2238 - protein, 18 aa, Artificial Sequence
  Synthetically generated peptide
  VARIANT (4)..(8): Xaa = Any Amino Acid
  misc_feature (11)..(11): Xaa can be any naturally occurring amino acid
  misc_feature (16)..(16): Xaa can be any naturally occurring amino acid
CCEXYCCXNPXACTGXCY

SEQ ID NO: 2239 - protein, 18 aa, Artificial Sequence
  Synthetically generated peptide
  VARIANT (4)..(8): Xaa = Any Amino Acid
  misc_feature (11)..(11): Xaa can be any naturally occurring amino acid
  misc_feature (17)..(17): Xaa can be any naturally occurring amino acid
CCEXYCCXNPXACTGCXY

SEQ ID NO: 2240 - protein, 17 aa, Artificial Sequence
  Synthetically generated peptide
  VARIANT (4)..(8): Xaa = Any Amino Acid
  misc_feature (12)..(12): Xaa can be any naturally occurring amino acid
CCEXYCCXNPAXCTGCY

SEQ ID NO: 2241 - protein, 18 aa, Artificial Sequence
  Synthetically generated peptide
  VARIANT (4)..(8): Xaa = Any Amino Acid
  misc_feature (12)..(13): Xaa can be any naturally occurring amino acid
CCEXYCCXNPAXXCTGCY

SEQ ID NO: 2242 - protein, 18 aa, Artificial Sequence
  Synthetically generated peptide
  VARIANT (4)..(8): Xaa = Any Amino Acid
  misc_feature (12)..(12): Xaa can be any naturally occurring amino acid
  misc_feature (14)..(14): Xaa can be any naturally occurring amino acid
CCEXYCCXNPAXCXTGCY

SEQ ID NO: 2243 - protein, 18 aa, Artificial Sequence
  Synthetically generated peptide
  VARIANT (4)..(8): Xaa = Any Amino Acid
  misc_feature (12)..(12): Xaa can be any naturally occurring amino acid
  misc_feature (15)..(15): Xaa can be any naturally occurring amino acid
CCEXYCCXNPAXCTXGCY

SEQ ID NO: 2244 - protein, 18 aa, Artificial Sequence
  Synthetically generated peptide
  VARIANT (4)..(8): Xaa = Any Amino Acid
  misc_feature (12)..(12): Xaa can be any naturally occurring amino acid
  misc_feature (16)..(16): Xaa can be any naturally occurring amino acid
CCEXYCCXNPAXCTGXCY

SEQ ID NO: 2245 - protein, 18 aa, Artificial Sequence
  Synthetically generated peptide
  VARIANT (4)..(8): Xaa = Any Amino Acid
  misc_feature (12)..(12): Xaa can be any naturally occurring amino acid
  misc_feature (17)..(17): Xaa can be any naturally occurring amino acid
CCEXYCCXNPAXCTGCXY

SEQ ID NO: 2246 - protein, 17 aa, Artificial Sequence
  Synthetically generated peptide
  VARIANT (4)..(8): Xaa = Any Amino Acid
  misc_feature (13)..(13): Xaa can be any naturally occurring amino acid
CCEXYCCXNPACXTGCY

SEQ ID NO: 2247 - protein, 18 aa, Artificial Sequence
  Synthetically generated peptide
  VARIANT (4)..(8): Xaa = Any Amino Acid
  misc_feature (13)..(14): Xaa can be any naturally occurring amino acid
CCEXYCCXNPACXXTGCY

SEQ ID NO: 2248 - protein, 18 aa, Artificial Sequence
  Synthetically generated peptide
  VARIANT (4)..(8): Xaa = Any Amino Acid
  misc_feature (13)..(13): Xaa can be any naturally occurring amino acid
  misc_feature (15)..(15): Xaa can be any naturally occurring amino acid
CCEXYCCXNPACXTXGCY

SEQ ID NO: 2249 - protein, 18 aa, Artificial Sequence
  Synthetically generated peptide
  VARIANT (4)..(8): Xaa = Any Amino Acid
  misc_feature (13)..(13): Xaa can be any naturally occurring amino acid
  misc_feature (16)..(16): Xaa can be any naturally occurring amino acid
CCEXYCCXNPACXTGXCY

SEQ ID NO: 2250 - protein, 18 aa, Artificial Sequence
  Synthetically generated peptide
  VARIANT (4)..(8): Xaa = Any Amino Acid
  misc_feature (13)..(13): Xaa can be any naturally occurring amino acid
  misc_feature (17)..(17): Xaa can be any naturally occurring amino acid
CCEXYCCXNPACXTGCXY

SEQ ID NO: 2251 - protein, 17 aa, Artificial Sequence
  Synthetically generated peptide
  VARIANT (4)..(8): Xaa = Any Amino Acid
  misc_feature (14)..(14): Xaa can be any naturally occurring amino acid
CCEXYCCXNPACTXGCY

SEQ ID NO: 2252 - protein, 18 aa, Artificial Sequence
  Synthetically generated peptide
  VARIANT (4)..(8): Xaa = Any Amino Acid
  misc_feature (14)..(15): Xaa can be any naturally occurring amino acid
CCEXYCCXNPACTXXGCY

SEQ ID NO: 2253 - protein, 18 aa, Artificial Sequence
  Synthetically generated peptide
  VARIANT (4)..(8): Xaa = Any Amino Acid
  misc_feature (14)..(14): Xaa can be any naturally occurring amino acid
  misc_feature (16)..(16): Xaa can be any naturally occurring amino acid
CCEXYCCXNPACTXGXCY

SEQ ID NO: 2254 - protein, 18 aa, Artificial Sequence
  Synthetically generated peptide
  VARIANT (4)..(8): Xaa = Any Amino Acid
  misc_feature (14)..(14): Xaa can be any naturally occurring amino acid
  misc_feature (17)..(17): Xaa can be any naturally occurring amino acid
CCEXYCCXNPACTXGCXY

SEQ ID NO: 2255 - protein, 17 aa, Artificial Sequence
  Synthetically generated peptide
  VARIANT (4)..(8): Xaa = Any Amino Acid
  misc_feature (15)..(15): Xaa can be any naturally occurring amino acid
CCEXYCCXNPACTGXCY

SEQ ID NO: 2256 - protein, 18 aa, Artificial Sequence
  Synthetically generated peptide
  VARIANT (4)..(8): Xaa = Any Amino Acid
  misc_feature (15)..(16): Xaa can be any naturally occurring amino acid
CCEXYCCXNPACTGXXCY

SEQ ID NO: 2257 - protein, 18 aa, Artificial Sequence
  Synthetically generated peptide
  VARIANT (4)..(8): Xaa = Any Amino Acid
  misc_feature (15)..(15): Xaa can be any naturally occurring amino acid
  misc_feature (17)..(17): Xaa can be any naturally occurring amino acid
CCEXYCCXNPACTGXCXY

SEQ ID NO: 2258 - protein, 17 aa, Artificial Sequence
  Synthetically generated peptide
  VARIANT (4)..(8): Xaa = Any Amino Acid
  misc_feature (16)..(16): Xaa can be any naturally occurring amino acid
CCEXYCCXNPACTGCXY

SEQ ID NO: 2259 - protein, 18 aa, Artificial Sequence
  Synthetically generated peptide
  VARIANT (4)..(8): Xaa = Any Amino Acid
  misc_feature (16)..(17): Xaa can be any naturally occurring amino acid
CCEXYCCXNPACTGCXXY

SEQ ID NO: 2260 - protein, 16 aa, Artificial Sequence
  Synthetically generated peptide
  VARIANT (4)..(9): Xaa = Any Amino Acid
CCEXYCCNXPACTGCY

SEQ ID NO: 2261 - protein, 17 aa, Artificial Sequence
  Synthetically generated peptide
  VARIANT (4)..(9): Xaa = Any Amino Acid
  misc_feature (10)..(10): Xaa can be any naturally occurring amino acid
CCEXYCCNXXPACTGCY

SEQ ID NO: 2262 - protein, 18 aa, Artificial Sequence
  Synthetically generated peptide
  VARIANT (4)..(9): Xaa = Any Amino Acid
  misc_feature (10)..(11): Xaa can be any naturally occurring amino acid
CCEXYCCNXXXPACTGCY

SEQ ID NO: 2263 - protein, 18 aa, Artificial Sequence
  Synthetically generated peptide
  VARIANT (4)..(9): Xaa = Any Amino Acid
  misc_feature (10)..(10): Xaa can be any naturally occurring amino acid
  misc_feature (12)..(12): Xaa can be any naturally occurring amino acid
CCEXYCCNXXPXACTGCY

SEQ ID NO: 2264 - protein, 18 aa, Artificial Sequence
  Synthetically generated peptide
  VARIANT (4)..(9): Xaa = Any Amino Acid
  misc_feature (10)..(10): Xaa can be any naturally occurring amino acid
  misc_feature (13)..(13): Xaa can be any naturally occurring amino acid
CCEXYCCNXXPAXCTGCY

SEQ ID NO: 2265 - protein, 18 aa, Artificial Sequence
  Synthetically generated peptide
  VARIANT (4)..(9): Xaa = Any Amino Acid
  misc_feature (10)..(10): Xaa can be any naturally occurring amino acid
  misc_feature (14)..(14): Xaa can be any naturally occurring amino acid
CCEXYCCNXXPACXTGCY

SEQ ID NO: 2266 - protein, 18 aa, Artificial Sequence
  Synthetically generated peptide
  VARIANT (4)..(9): Xaa = Any Amino Acid
  misc_feature (10)..(10): Xaa can be any naturally occurring amino acid
  misc_feature (15)..(15): Xaa can be any naturally occurring amino acid
CCEXYCCNXXPACTXGCY

SEQ ID NO: 2267 - protein, 18 aa, Artificial Sequence
  Synthetically generated peptide
  VARIANT (4)..(9): Xaa = Any Amino Acid
  misc_feature (10)..(10): Xaa can be any naturally occurring amino acid
  misc_feature (16)..(16): Xaa can be any naturally occurring amino acid
CCEXYCCNXXPACTGXCY

SEQ ID NO: 2268 - protein, 18 aa, Artificial Sequence
  Synthetically generated peptide
  VARIANT (4)..(9): Xaa = Any Amino Acid
  misc_feature (10)..(10): Xaa can be any naturally occurring amino acid
  misc_feature (17)..(17): Xaa can be any naturally occurring amino acid
CCEXYCCNXXPACTGCXY

SEQ ID NO: 2269 - protein, 17 aa, Artificial Sequence
  Synthetically generated peptide
  VARIANT (4)..(9): Xaa = Any Amino Acid
  misc_feature (11)..(11): Xaa can be any naturally occurring amino acid
CCEXYCCNXPXACTGCY

SEQ ID NO: 2270 - protein, 18 aa, Artificial Sequence
  Synthetically generated peptide
  VARIANT (4)..(9): Xaa = Any Amino Acid
  misc_feature (11)..(12): Xaa can be any naturally occurring amino acid
CCEXYCCNXPXXACTGCY

SEQ ID NO: 2271 - protein, 18 aa, Artificial Sequence
  Synthetically generated peptide
  VARIANT (4)..(9): Xaa = Any Amino Acid
  misc_feature (11)..(11): Xaa can be any naturally occurring amino acid
  misc_feature (13)..(13): Xaa can be any naturally occurring amino acid
CCEXYCCNXPXAXCTGCY

SEQ ID NO: 2272 - protein, 18 aa, Artificial Sequence
  Synthetically generated peptide
  VARIANT (4)..(9): Xaa = Any Amino Acid
  misc_feature (11)..(11): Xaa can be any naturally occurring amino acid
  misc_feature (14)..(14): Xaa can be any naturally occurring amino acid
CCEXYCCNXPXACXTGCY

SEQ ID NO: 2273 - protein, 18 aa, Artificial Sequence
  Synthetically generated peptide
  VARIANT (4)..(9): Xaa = Any Amino Acid
  misc_feature (11)..(11): Xaa can be any naturally occurring amino acid
  misc_feature (15)..(15): Xaa can be any naturally occurring amino acid
CCEXYCCNXPXACTXGCY

SEQ ID NO: 2274 - protein, 18 aa, Artificial Sequence
  Synthetically generated peptide
  VARIANT (4)..(9): Xaa = Any Amino Acid
  misc_feature (11)..(11): Xaa can be any naturally occurring amino acid
  misc_feature (16)..(16): Xaa can be any naturally occurring amino acid
CCEXYCCNXPXACTGXCY

SEQ ID NO: 2275 - protein, 18 aa, Artificial Sequence
  Synthetically generated peptide
  VARIANT (4)..(9): Xaa = Any Amino Acid
  misc_feature (11)..(11): Xaa can be any naturally occurring amino acid
  misc_feature (17)..(17): Xaa can be any naturally occurring amino acid
CCEXYCCNXPXACTGCXY

SEQ ID NO: 2276 - protein, 17 aa, Artificial Sequence
  Synthetically generated peptide
  VARIANT (4)..(9): Xaa = Any Amino Acid
  misc_feature (12)..(12): Xaa can be any naturally occurring amino acid
CCEXYCCNXPAXCTGCY

SEQ ID NO: 2277 - protein, 18 aa, Artificial Sequence
  Synthetically generated peptide
  VARIANT (4)..(9): Xaa = Any Amino Acid
  misc_feature (12)..(13): Xaa can be any naturally occurring amino acid
CCEXYCCNXPAXXCTGCY

SEQ ID NO: 2278 - protein, 18 aa, Artificial Sequence
  Synthetically generated peptide
  VARIANT (4)..(9): Xaa = Any Amino Acid
  misc_feature (12)..(12): Xaa can be any naturally occurring amino acid
  misc_feature (14)..(14): Xaa can be any naturally occurring amino acid
CCEXYCCNXPAXCXTGCY

SEQ ID NO: 2279 - protein, 18 aa, Artificial Sequence
  Synthetically generated peptide
  VARIANT (4)..(9): Xaa = Any Amino Acid
  misc_feature (12)..(12): Xaa can be any naturally occurring amino acid
  misc_feature (15)..(15): Xaa can be any naturally occurring amino acid
CCEXYCCNXPAXCTXGCY

SEQ ID NO: 2280 - protein, 18 aa, Artificial Sequence
  Synthetically generated peptide
  VARIANT (4)..(9): Xaa = Any Amino Acid
  misc_feature (12)..(12): Xaa can be any naturally occurring amino acid
  misc_feature (16)..(16): Xaa can be any naturally occurring amino acid
CCEXYCCNXPAXCTGXCY

SEQ ID NO: 2281 - protein, 18 aa, Artificial Sequence
  Synthetically generated peptide
  VARIANT (4)..(9): Xaa = Any Amino Acid
  misc_feature (12)..(12): Xaa can be any naturally occurring amino acid
  misc_feature (17)..(17): Xaa can be any naturally occurring amino acid
CCEXYCCNXPAXCTGCXY

SEQ ID NO: 2282 - protein, 17 aa, Artificial Sequence
  Synthetically generated peptide
  VARIANT (4)..(9): Xaa = Any Amino Acid
  misc_feature (13)..(13): Xaa can be any naturally occurring amino acid
CCEXYCCNXPACXTGCY

SEQ ID NO: 2283 - protein, 18 aa, Artificial Sequence
  Synthetically generated peptide
  VARIANT (4)..(9): Xaa = Any Amino Acid
  misc_feature (13)..(14): Xaa can be any naturally occurring amino acid
CCEXYCCNXPACXXTGCY

SEQ ID NO: 2284 - protein, 18 aa, Artificial Sequence
  Synthetically generated peptide
  VARIANT (4)..(9): Xaa = Any Amino Acid
  misc_feature (13)..(13): Xaa can be any naturally occurring amino acid
  misc_feature (15)..(15): Xaa can be any naturally occurring amino acid
CCEXYCCNXPACXTXGCY

SEQ ID NO: 2285 - protein, 18 aa, Artificial Sequence
  Synthetically generated peptide
  VARIANT (4)..(9): Xaa = Any Amino Acid
  misc_feature (13)..(13): Xaa can be any naturally occurring amino acid
  misc_feature (16)..(16): Xaa can be any naturally occurring amino acid
CCEXYCCNXPACXTGXCY

SEQ ID NO: 2286 - protein, 18 aa, Artificial Sequence
  Synthetically generated peptide
  VARIANT (4)..(9): Xaa = Any Amino Acid
  misc_feature (13)..(13): Xaa can be any naturally occurring amino acid
  misc_feature (17)..(17): Xaa can be any naturally occurring amino acid
CCEXYCCNXPACXTGCXY

SEQ ID NO: 2287 - protein, 17 aa, Artificial Sequence
  Synthetically generated peptide
  VARIANT (4)..(9): Xaa = Any Amino Acid
  misc_feature (14)..(14): Xaa can be any naturally occurring amino acid
CCEXYCCNXPACTXGCY

SEQ ID NO: 2288 - protein, 18 aa, Artificial Sequence
  Synthetically generated peptide
  VARIANT (4)..(9): Xaa = Any Amino Acid
  misc_feature (14)..(15): Xaa can be any naturally occurring amino acid
CCEXYCCNXPACTXXGCY

SEQ ID NO: 2289 - protein, 18 aa, Artificial Sequence
  Synthetically generated peptide
  VARIANT (4)..(9): Xaa = Any Amino Acid
  misc_feature (14)..(14): Xaa can be any naturally occurring amino acid
  misc_feature (16)..(16): Xaa can be any naturally occurring amino acid
CCEXYCCNXPACTXGXCY

SEQ ID NO: 2290 - protein, 18 aa, Artificial Sequence
  Synthetically generated peptide
  VARIANT (4)..(9): Xaa = Any Amino Acid
  misc_feature (14)..(14): Xaa can be any naturally occurring amino acid
  misc_feature (17)..(17): Xaa can be any naturally occurring amino acid
CCEXYCCNXPACTXGCXY

SEQ ID NO: 2291 - protein, 17 aa, Artificial Sequence
  Synthetically generated peptide
  VARIANT (4)..(9): Xaa = Any Amino Acid
  misc_feature (15)..(15): Xaa can be any naturally occurring amino acid
CCEXYCCNXPACTGXCY

SEQ ID NO: 2292 - protein, 18 aa, Artificial Sequence
  Synthetically generated peptide
  VARIANT (4)..(9): Xaa = Any Amino Acid
  misc_feature (15)..(16): Xaa can be any naturally occurring amino acid
CCEXYCCNXPACTGXXCY

SEQ ID NO: 2293 - protein, 18 aa, Artificial Sequence
  Synthetically generated peptide
  VARIANT (4)..(9): Xaa = Any Amino Acid
  misc_feature (15)..(15): Xaa can be any naturally occurring amino acid
  misc_feature (17)..(17): Xaa can be any naturally occurring amino acid
CCEXYCCNXPACTGXCXY

SEQ ID NO: 2294 - protein, 17 aa, Artificial Sequence
  Synthetically generated peptide
  VARIANT (4)..(9): Xaa = Any Amino Acid
  misc_feature (16)..(16): Xaa can be any naturally occurring amino acid
CCEXYCCNXPACTGCXY

SEQ ID NO: 2295 - protein, 18 aa, Artificial Sequence
  Synthetically generated peptide
  VARIANT (4)..(9): Xaa = Any Amino Acid
  misc_feature (16)..(17): Xaa can be any naturally occurring amino acid
CCEXYCCNXPACTGCXXY

SEQ ID NO: 2296 - protein, 16 aa, Artificial Sequence
  Synthetically generated peptide
  VARIANT (4)..(10): Xaa = Any Amino Acid
CCEXYCCNPXACTGCY

SEQ ID NO: 2297 - protein, 17 aa, Artificial Sequence
  Synthetically generated peptide
  VARIANT (4)..(10): Xaa = Any Amino Acid
  misc_feature (11)..(11): Xaa can be any naturally occurring amino acid
CCEXYCCNPXXACTGCY

SEQ ID NO: 2298 - protein, 18 aa, Artificial Sequence
  Synthetically generated peptide
  VARIANT (4)..(10): Xaa = Any Amino Acid
  misc_feature (11)..(12): Xaa can be any naturally occurring amino acid
CCEXYCCNPXXXACTGCY

SEQ ID NO: 2299 - protein, 18 aa, Artificial Sequence
  Synthetically generated peptide
  VARIANT (4)..(10): Xaa = Any Amino Acid
  misc_feature (11)..(11): Xaa can be any naturally occurring amino acid
  misc_feature (13)..(13): Xaa can be any naturally occurring amino acid
CCEXYCCNPXXAXCTGCY

SEQ ID NO: 2300 - protein, 18 aa, Artificial Sequence
  Synthetically generated peptide
  VARIANT (4)..(10): Xaa = Any Amino Acid
  misc_feature (11)..(11): Xaa can be any naturally occurring amino acid
  misc_feature (14)..(14): Xaa can be any naturally occurring amino acid
CCEXYCCNPXXACXTGCY

SEQ ID NO: 2301 - protein, 18 aa, Artificial Sequence
  Synthetically generated peptide
  VARIANT (4)..(10): Xaa = Any Amino Acid
  misc_feature (11)..(11): Xaa can be any naturally occurring amino acid
  misc_feature (15)..(15): Xaa can be any naturally occurring amino acid
CCEXYCCNPXXACTXGCY

SEQ ID NO: 2302 - protein, 18 aa, Artificial Sequence
  Synthetically generated peptide
  VARIANT (4)..(10): Xaa = Any Amino Acid
  misc_feature (11)..(11): Xaa can be any naturally occurring amino acid
  misc_feature (16)..(16): Xaa can be any naturally occurring amino acid
CCEXYCCNPXXACTGXCY

SEQ ID NO: 2303 - protein, 18 aa, Artificial Sequence
  Synthetically generated peptide
  VARIANT (4)..(10): Xaa = Any Amino Acid
  misc_feature (11)..(11): Xaa can be any naturally occurring amino acid
  misc_feature (17)..(17): Xaa can be any naturally occurring amino acid
CCEXYCCNPXXACTGCXY

SEQ ID NO: 2304 - protein, 17 aa, Artificial Sequence
  Synthetically generated peptide
  VARIANT (4)..(10): Xaa = Any Amino Acid
  misc_feature (12)..(12): Xaa can be any naturally occurring amino acid
CCEXYCCNPXAXCTGCY

SEQ ID NO: 2305 - protein, 18 aa, Artificial Sequence
  Synthetically generated peptide
  VARIANT (4)..(10): Xaa = Any Amino Acid
  misc_feature (12)..(13): Xaa can be any naturally occurring amino acid
CCEXYCCNPXAXXCTGCY

SEQ ID NO: 2306 - protein, 18 aa, Artificial Sequence
  Synthetically generated peptide
  VARIANT (4)..(10): Xaa = Any Amino Acid
  misc_feature (12)..(12): Xaa can be any naturally occurring amino acid
  misc_feature (14)..(14): Xaa can be any naturally occurring amino acid
CCEXYCCNPXAXCXTGCY

SEQ ID NO: 2307 - protein, 18 aa, Artificial Sequence
  Synthetically generated peptide
  VARIANT (4)..(10): Xaa = Any Amino Acid
  misc_feature (12)..(12): Xaa can be any naturally occurring amino acid
  misc_feature (15)..(15): Xaa can be any naturally occurring amino acid
CCEXYCCNPXAXCTXGCY

SEQ ID NO: 2308 - protein, 18 aa, Artificial Sequence
  Synthetically generated peptide
  VARIANT (4)..(10): Xaa = Any Amino Acid
  misc_feature (12)..(12): Xaa can be any naturally occurring amino acid
  misc_feature (16)..(16): Xaa can be any naturally occurring amino acid
CCEXYCCNPXAXCTGXCY

SEQ ID NO: 2309 - protein, 18 aa, Artificial Sequence
  Synthetically generated peptide
  VARIANT (4)..(10): Xaa = Any Amino Acid
  misc_feature (12)..(12): Xaa can be any naturally occurring amino acid
  misc_feature (17)..(17): Xaa can be any naturally occurring amino acid
CCEXYCCNPXAXCTGCXY

SEQ ID NO: 2310 - protein, 17 aa, Artificial Sequence
  Synthetically generated peptide
  VARIANT (4)..(10): Xaa = Any Amino Acid
  misc_feature (13)..(13): Xaa can be any naturally occurring amino acid
CCEXYCCNPXACXTGCY

SEQ ID NO: 2311 - protein, 18 aa, Artificial Sequence
  Synthetically generated peptide
  VARIANT (4)..(10): Xaa = Any Amino Acid
  misc_feature (13)..(14): Xaa can be any naturally occurring amino acid
CCEXYCCNPXACXXTGCY

SEQ ID NO: 2312 - protein, 18 aa, Artificial Sequence
  Synthetically generated peptide
  VARIANT (4)..(10): Xaa = Any Amino Acid
  misc_feature (13)..(13): Xaa can be any naturally occurring amino acid
  misc_feature (15)..(15): Xaa can be any naturally occurring amino acid
CCEXYCCNPXACXTXGCY

SEQ ID NO: 2313 - protein, 18 aa, Artificial Sequence
  Synthetically generated peptide
  VARIANT (4)..(10): Xaa = Any Amino Acid
  misc_feature (13)..(13): Xaa can be any naturally occurring amino acid
  misc_feature (16)..(16): Xaa can be any naturally occurring amino acid
CCEXYCCNPXACXTGXCY

SEQ ID NO: 2314 - protein, 18 aa, Artificial Sequence
  Synthetically generated peptide
  VARIANT (4)..(10): Xaa = Any Amino Acid
  misc_feature (13)..(13): Xaa can be any naturally occurring amino acid
  misc_feature (17)..(17): Xaa can be any naturally occurring amino acid
CCEXYCCNPXACXTGCXY

SEQ ID NO: 2315 - protein, 17 aa, Artificial Sequence
  Synthetically generated peptide
  VARIANT (4)..(10): Xaa = Any Amino Acid
  misc_feature (14)..(14): Xaa can be any naturally occurring amino acid
CCEXYCCNPXACTXGCY

SEQ ID NO: 2316 - protein, 18 aa, Artificial Sequence
  Synthetically generated peptide
  VARIANT (4)..(10): Xaa = Any Amino Acid
  misc_feature (14)..(15): Xaa can be any naturally occurring amino acid
CCEXYCCNPXACTXXGCY

SEQ ID NO: 2317 - protein, 18 aa, Artificial Sequence
  Synthetically generated peptide
  VARIANT (4)..(10): Xaa = Any Amino Acid
  misc_feature (14)..(14): Xaa can be any naturally occurring amino acid
  misc_feature (16)..(16): Xaa can be any naturally occurring amino acid
CCEXYCCNPXACTXGXCY

SEQ ID NO: 2318 - protein, 18 aa, Artificial Sequence
  Synthetically generated peptide
  VARIANT (4)..(10): Xaa = Any Amino Acid
  misc_feature (14)..(14): Xaa can be any naturally occurring amino acid
  misc_feature (17)..(17): Xaa can be any naturally occurring amino acid
CCEXYCCNPXACTXGCXY

SEQ ID NO: 2319 - protein, 17 aa, Artificial Sequence
  Synthetically generated peptide
  VARIANT (4)..(10): Xaa = Any Amino Acid
  misc_feature (15)..(15): Xaa can be any naturally occurring amino acid
CCEXYCCNPXACTGXCY

SEQ ID NO: 2320 - protein, 18 aa, Artificial Sequence
  Synthetically generated peptide
  VARIANT (4)..(10): Xaa = Any Amino Acid
  misc_feature (15)..(16): Xaa can be any naturally occurring amino acid
CCEXYCCNPXACTGXXCY

SEQ ID NO: 2321 - protein, 18 aa, Artificial Sequence
  Synthetically generated peptide
  VARIANT (4)..(10): Xaa = Any Amino Acid
  misc_feature (15)..(15): Xaa can be any naturally occurring amino acid
  misc_feature (17)..(17): Xaa can be any naturally occurring amino acid
CCEXYCCNPXACTGXCXY

SEQ ID NO: 2322 - protein, 17 aa, Artificial Sequence
  Synthetically generated peptide
  VARIANT (4)..(10): Xaa = Any Amino Acid
  misc_feature (16)..(16): Xaa can be any naturally occurring amino acid
CCEXYCCNPXACTGCXY

SEQ ID NO: 2323 - protein, 18 aa, Artificial Sequence
  Synthetically generated peptide
  VARIANT (4)..(10): Xaa = Any Amino Acid
  misc_feature (16)..(17): Xaa can be any naturally occurring amino acid
CCEXYCCNPXACTGCXXY

SEQ ID NO: 2324 - protein, 16 aa, Artificial Sequence
  Synthetically generated peptide
  VARIANT (4)..(11): Xaa = Any Amino Acid
CCEXYCCNPAXCTGCY

SEQ ID NO: 2325 - protein, 17 aa, Artificial Sequence
  Synthetically generated peptide
  VARIANT (4)..(11): Xaa = Any Amino Acid
  misc_feature (12)..(12): Xaa can be any naturally occurring amino acid
CCEXYCCNPAXXCTGCY

SEQ ID NO: 2326 - protein, 18 aa, Artificial Sequence
  Synthetically generated peptide
  VARIANT (4)..(11): Xaa = Any Amino Acid
  misc_feature (12)..(13): Xaa can be any naturally occurring amino acid
CCEXYCCNPAXXXCTGCY

SEQ ID NO: 2327 - protein, 18 aa, Artificial Sequence
  Synthetically generated peptide
  VARIANT (4)..(11): Xaa = Any Amino Acid
  misc_feature (12)..(12): Xaa can be any naturally occurring amino acid
  misc_feature (14)..(14): Xaa can be any naturally occurring amino acid
CCEXYCCNPAXXCXTGCY

SEQ ID NO: 2328 - protein, 18 aa, Artificial Sequence
  Synthetically generated peptide
  VARIANT (4)..(11): Xaa = Any Amino Acid
  misc_feature (12)..(12): Xaa can be any naturally occurring amino acid
  misc_feature (15)..(15): Xaa can be any naturally occurring amino acid
CCEXYCCNPAXXCTXGCY

SEQ ID NO: 2329 - protein, 18 aa, Artificial Sequence
  Synthetically generated peptide
  VARIANT (4)..(11): Xaa = Any Amino Acid
  misc_feature (12)..(12): Xaa can be any naturally occurring amino acid
  misc_feature (16)..(16): Xaa can be any naturally occurring amino acid
CCEXYCCNPAXXCTGXCY

SEQ ID NO: 2330 - protein, 18 aa, Artificial Sequence
  Synthetically generated peptide
  VARIANT (4)..(11): Xaa = Any Amino Acid
  misc_feature (12)..(12): Xaa can be any naturally occurring amino acid
  misc_feature (17)..(17): Xaa can be any naturally occurring amino acid
CCEXYCCNPAXXCTGCXY

SEQ ID NO: 2331 - protein, 17 aa, Artificial Sequence
  Synthetically generated peptide
  VARIANT (4)..(11): Xaa = Any Amino Acid
  misc_feature (13)..(13): Xaa can be any naturally occurring amino acid
CCEXYCCNPAXCXTGCY

SEQ ID NO: 2332 - protein, 18 aa, Artificial Sequence
  Synthetically generated peptide
  VARIANT (4)..(11): Xaa = Any Amino Acid
  misc_feature (13)..(14): Xaa can be any naturally occurring amino acid
CCEXYCCNPAXCXXTGCY

SEQ ID NO: 2333 - protein, 18 aa, Artificial Sequence
  Synthetically generated peptide
  VARIANT (4)..(11): Xaa = Any Amino Acid
  misc_feature (13)..(13): Xaa can be any naturally occurring amino acid
  misc_feature (15)..(15): Xaa can be any naturally occurring amino acid
CCEXYCCNPAXCXTXGCY

SEQ ID NO: 2334 - protein, 18 aa, Artificial Sequence
  Synthetically generated peptide
  VARIANT (4)..(11): Xaa = Any Amino Acid
  misc_feature (13)..(13): Xaa can be any naturally occurring amino acid
  misc_feature (16)..(16): Xaa can be any naturally occurring amino acid
CCEXYCCNPAXCXTGXCY

SEQ ID NO: 2335 - protein, 18 aa, Artificial Sequence
  Synthetically generated peptide
  VARIANT (4)..(11): Xaa = Any Amino Acid
  misc_feature (13)..(13): Xaa can be any naturally occurring amino acid
  misc_feature (17)..(17): Xaa can be any naturally occurring amino acid
CCEXYCCNPAXCXTGCXY

SEQ ID NO: 2336 - protein, 17 aa, Artificial Sequence
  Synthetically generated peptide
  VARIANT (4)..(11): Xaa = Any Amino Acid
  misc_feature (14)..(14): Xaa can be any naturally occurring amino acid
CCEXYCCNPAXCTXGCY

SEQ ID NO: 2337 - protein, 18 aa, Artificial Sequence
  Synthetically generated peptide
  VARIANT (4)..(11): Xaa = Any Amino Acid
  misc_feature (14)..(15): Xaa can be any naturally occurring amino acid
CCEXYCCNPAXCTXXGCY

SEQ ID NO: 2338 - protein, 18 aa, Artificial Sequence
  Synthetically generated peptide
  VARIANT (4)..(11): Xaa = Any Amino Acid
  misc_feature (14)..(14): Xaa can be any naturally occurring amino acid
  misc_feature (16)..(16): Xaa can be any naturally occurring amino acid
CCEXYCCNPAXCTXGXCY

SEQ ID NO: 2339 - protein, 18 aa, Artificial Sequence
  Synthetically generated peptide
  VARIANT (4)..(11): Xaa = Any Amino Acid
  misc_feature (14)..(14): Xaa can be any naturally occurring amino acid
  misc_feature (17)..(17): Xaa can be any naturally occurring amino acid
CCEXYCCNPAXCTXGCXY

SEQ ID NO: 2340 - protein, 17 aa, Artificial Sequence
  Synthetically generated peptide
  VARIANT (4)..(11): Xaa = Any Amino Acid
  misc_feature (15)..(15): Xaa can be any naturally occurring amino acid
CCEXYCCNPAXCTGXCY

SEQ ID NO: 2341 - protein, 18 aa, Artificial Sequence
  Synthetically generated peptide
  VARIANT (4)..(11): Xaa = Any Amino Acid
  misc_feature (15)..(16): Xaa can be any naturally occurring amino acid
CCEXYCCNPAXCTGXXCY

SEQ ID NO: 2342 - protein, 18 aa, Artificial Sequence
  Synthetically generated peptide
  VARIANT (4)..(11): Xaa = Any Amino Acid
  misc_feature (15)..(15): Xaa can be any naturally occurring amino acid
  misc_feature (17)..(17): Xaa can be any naturally occurring amino acid
CCEXYCCNPAXCTGXCXY

SEQ ID NO: 2343 - protein, 17 aa, Artificial Sequence
  Synthetically generated peptide
  VARIANT (4)..(11): Xaa = Any Amino Acid
  misc_feature (16)..(16): Xaa can be any naturally occurring amino acid
CCEXYCCNPAXCTGCXY

SEQ ID NO: 2344 - protein, 18 aa, Artificial Sequence
  Synthetically generated peptide
  VARIANT (4)..(11): Xaa = Any Amino Acid
  misc_feature (16)..(17): Xaa can be any naturally occurring amino acid
CCEXYCCNPAXCTGCXXY

SEQ ID NO: 2345 - protein, 16 aa, Artificial Sequence
  Synthetically generated peptide
  VARIANT (4)..(12): Xaa = Any Amino Acid
CCEXYCCNPACXTGCY

SEQ ID NO: 2346 - protein, 17 aa, Artificial Sequence
  Synthetically generated peptide
  VARIANT (4)..(12): Xaa = Any Amino Acid
  misc_feature (13)..(13): Xaa can be any naturally occurring amino acid
CCEXYCCNPACXXTGCY

SEQ ID NO: 2347 - protein, 18 aa, Artificial Sequence
  Synthetically generated peptide
  VARIANT (4)..(12): Xaa = Any Amino Acid
  misc_feature (13)..(14): Xaa can be any naturally occurring amino acid
CCEXYCCNPACXXXTGCY

SEQ ID NO: 2348 - protein, 18 aa, Artificial Sequence
  Synthetically generated peptide
  VARIANT (4)..(12): Xaa = Any Amino Acid
  misc_feature (13)..(13): Xaa can be any naturally occurring amino acid
  misc_feature (15)..(15): Xaa can be any naturally occurring amino acid
CCEXYCCNPACXXTXGCY

SEQ ID NO: 2349 - protein, 18 aa, Artificial Sequence
  Synthetically generated peptide
  VARIANT (4)..(12): Xaa = Any Amino Acid
  misc_feature (13)..(13): Xaa can be any naturally occurring amino acid
  misc_feature (16)..(16): Xaa can be any naturally occurring amino acid
CCEXYCCNPACXXTGXCY

SEQ ID NO: 2350 - protein, 18 aa, Artificial Sequence
  Synthetically generated peptide
  VARIANT (4)..(12): Xaa = Any Amino Acid
  misc_feature (13)..(13): Xaa can be any naturally occurring amino acid
  misc_feature (17)..(17): Xaa can be any naturally occurring amino acid
CCEXYCCNPACXXTGCXY

SEQ ID NO: 2351 - protein, 17 aa, Artificial Sequence
  Synthetically generated peptide
  VARIANT (4)..(12): Xaa = Any Amino Acid
  misc_feature (14)..(14): Xaa can be any naturally occurring amino acid
CCEXYCCNPACXTXGCY

SEQ ID NO: 2352 - protein, 18 aa, Artificial Sequence
  Synthetically generated peptide
  VARIANT (4)..(12): Xaa = Any Amino Acid
  misc_feature (14)..(15): Xaa can be any naturally occurring amino acid
CCEXYCCNPACXTXXGCY

SEQ ID NO: 2353 - protein, 18 aa, Artificial Sequence
  Synthetically generated peptide
  VARIANT (4)..(12): Xaa = Any Amino Acid
  misc_feature (14)..(14): Xaa can be any naturally occurring amino acid
  misc_feature (16)..(16): Xaa can be any naturally occurring amino acid
CCEXYCCNPACXTXGXCY

SEQ ID NO: 2354 - protein, 18 aa, Artificial Sequence
  Synthetically generated peptide
  VARIANT (4)..(12): Xaa = Any Amino Acid
  misc_feature (14)..(14): Xaa can be any naturally occurring amino acid
  misc_feature (17)..(17): Xaa can be any naturally occurring amino acid
CCEXYCCNPACXTXGCXY

SEQ ID NO: 2355 - protein, 17 aa, Artificial Sequence
  Synthetically generated peptide
  VARIANT (4)..(12): Xaa = Any Amino Acid
  misc_feature (15)..(15): Xaa can be any naturally occurring amino acid
CCEXYCCNPACXTGXCY

SEQ ID NO: 2356 - protein, 18 aa, Artificial Sequence
  Synthetically generated peptide
  VARIANT (4)..(12): Xaa = Any Amino Acid
  misc_feature (15)..(16): Xaa can be any naturally occurring amino acid
CCEXYCCNPACXTGXXCY

SEQ ID NO: 2357 - protein, 18 aa, Artificial Sequence
  Synthetically generated peptide
  VARIANT (4)..(12): Xaa = Any Amino Acid
  misc_feature (15)..(15): Xaa can be any naturally occurring amino acid
  misc_feature (17)..(17): Xaa can be any naturally occurring amino acid
CCEXYCCNPACXTGXCXY

SEQ ID NO: 2358 - protein, 17 aa, Artificial Sequence
  Synthetically generated peptide
  VARIANT (4)..(12): Xaa = Any Amino Acid
  misc_feature (16)..(16): Xaa can be any naturally occurring amino acid
CCEXYCCNPACXTGCXY

SEQ ID NO: 2359 - protein, 18 aa, Artificial Sequence
  Synthetically generated peptide
  VARIANT (4)..(12): Xaa = Any Amino Acid
  misc_feature (16)..(17): Xaa can be any naturally occurring amino acid
CCEXYCCNPACXTGCXXY

SEQ ID NO: 2360 - protein, 16 aa, Artificial Sequence
  Synthetically generated peptide
  VARIANT (4)..(13): Xaa = Any Amino Acid
CCEXYCCNPACTXGCY

SEQ ID NO: 2361 - protein, 17 aa, Artificial Sequence
  Synthetically generated peptide
  VARIANT (4)..(13): Xaa = Any Amino Acid
  misc_feature (14)..(14): Xaa can be any naturally occurring amino acid
CCEXYCCNPACTXXGCY

SEQ ID NO: 2362 - protein, 18 aa, Artificial Sequence
  Synthetically generated peptide
  VARIANT (4)..(13): Xaa = Any Amino Acid
  misc_feature (14)..(15): Xaa can be any naturally occurring amino acid
CCEXYCCNPACTXXXGCY

SEQ ID NO: 2363 - protein, 18 aa, Artificial Sequence
  Synthetically generated peptide
  VARIANT (4)..(13): Xaa = Any Amino Acid
  misc_feature (14)..(14): Xaa can be any naturally occurring amino acid
  misc_feature (16)..(16): Xaa can be any naturally occurring amino acid
CCEXYCCNPACTXXGXCY

SEQ ID NO: 2364 - protein, 18 aa, Artificial Sequence
  Synthetically generated peptide
  VARIANT (4)..(13): Xaa = Any Amino Acid
  misc_feature (14)..(14): Xaa can be any naturally occurring amino acid
  misc_feature (17)..(17): Xaa can be any naturally occurring amino acid
CCEXYCCNPACTXXGCXY

SEQ ID NO: 2365 - protein, 17 aa, Artificial Sequence
  Synthetically generated peptide
  VARIANT (4)..(13): Xaa = Any Amino Acid
  misc_feature (15)..(15): Xaa can be any naturally occurring amino acid
CCEXYCCNPACTXGXCY

SEQ ID NO: 2366 - protein, 18 aa, Artificial Sequence
  Synthetically generated peptide
  VARIANT (4)..(13): Xaa = Any Amino Acid
  misc_feature (15)..(16): Xaa can be any naturally occurring amino acid
CCEXYCCNPACTXGXXCY

SEQ ID NO: 2367 - protein, 18 aa, Artificial Sequence
  Synthetically generated peptide
  VARIANT (4)..(13): Xaa = Any Amino Acid
  misc_feature (15)..(15): Xaa can be any naturally occurring amino acid
  misc_feature (17)..(17): Xaa can be any naturally occurring amino acid
CCEXYCCNPACTXGXCXY

SEQ ID NO: 2368 - protein, 17 aa, Artificial Sequence
  Synthetically generated peptide
  VARIANT (4)..(13): Xaa = Any Amino Acid
  misc_feature (16)..(16): Xaa can be any naturally occurring amino acid
CCEXYCCNPACTXGCXY

SEQ ID NO: 2369 - protein, 18 aa, Artificial Sequence
  Synthetically generated peptide
  VARIANT (4)..(13): Xaa = Any Amino Acid
  misc_feature (16)..(17): Xaa can be any naturally occurring amino acid
CCEXYCCNPACTXGCXXY

SEQ ID NO: 2370 - protein, 16 aa, Artificial Sequence
  Synthetically generated peptide
  VARIANT (4)..(14): Xaa = Any Amino Acid
CCEXYCCNPACTGXCY

SEQ ID NO: 2371 - protein, 17 aa, Artificial Sequence
  Synthetically generated peptide
  VARIANT (4)..(14): Xaa = Any Amino Acid
  misc_feature (15)..(15): Xaa can be any naturally occurring amino acid
CCEXYCCNPACTGXXCY

SEQ ID NO: 2372 - protein, 18 aa, Artificial Sequence
  Synthetically generated peptide
  VARIANT (4)..(14): Xaa = Any Amino Acid
  misc_feature (15)..(16): Xaa can be any naturally occurring amino acid
CCEXYCCNPACTGXXXCY

SEQ ID NO: 2373 - protein, 18 aa, Artificial Sequence
  Synthetically generated peptide
  VARIANT (4)..(14): Xaa = Any Amino Acid
  misc_feature (15)..(15): Xaa can be any naturally occurring amino acid
  misc_feature (17)..(17): Xaa can be any naturally occurring amino acid
CCEXYCCNPACTGXXCXY

SEQ ID NO: 2374 - protein, 17 aa, Artificial Sequence
  Synthetically generated peptide
  VARIANT (4)..(14): Xaa = Any Amino Acid
  misc_feature (16)..(16): Xaa can be any naturally occurring amino acid
CCEXYCCNPACTGXCXY

SEQ ID NO: 2375 - protein, 18 aa, Artificial Sequence
  Synthetically generated peptide
  VARIANT (4)..(14): Xaa = Any Amino Acid
  misc_feature (16)..(17): Xaa can be any naturally occurring amino acid
CCEXYCCNPACTGXCXXY

SEQ ID NO: 2376 - protein, 16 aa, Artificial Sequence
  Synthetically generated peptide
  VARIANT (4)..(15): Xaa = Any Amino Acid
CCEXYCCNPACTGCXY

SEQ ID NO: 2377 - protein, 17 aa, Artificial Sequence
  Synthetically generated peptide
  VARIANT (4)..(15): Xaa = Any Amino Acid
  misc_feature (16)..(16): Xaa can be any naturally occurring amino acid
CCEXYCCNPACTGCXXY

SEQ ID NO: 2378 - protein, 18 aa, Artificial Sequence
  Synthetically generated peptide
  VARIANT (4)..(15): Xaa = Any Amino Acid
  misc_feature (16)..(17): Xaa can be any naturally occurring amino acid
CCEXYCCNPACTGCXXXY

SEQ ID NO: 2379 - protein, 15 aa, Artificial Sequence
  Synthetically generated peptide
  VARIANT (5)..(5): Xaa = Any Amino Acid
CCEYXCCNPACTGCY

SEQ ID NO: 2380 - protein, 16 aa, Artificial Sequence
  Synthetically generated peptide
  VARIANT (1)..(16): Xaa = Any Amino Acid
  VARIANT (5)..(6): Xaa = Any Amino Acid
CCEYXXCCNPACTGCY

SEQ ID NO: 2381 - protein, 17 aa, Artificial Sequence
  Synthetically generated peptide
  VARIANT (5)..(6): Xaa = Any Amino Acid
  misc_feature (7)..(7): Xaa can be any naturally occurring amino acid
CCEYXXXCCNPACTGCY

SEQ ID NO: 2382 - protein, 18 aa, Artificial Sequence
  Synthetically generated peptide
  VARIANT (5)..(6): Xaa = Any Amino Acid
  misc_feature (7)..(8): Xaa can be any naturally occurring amino acid
CCEYXXXXCCNPACTGCY

SEQ ID NO: 2383 - protein, 18 aa, Artificial Sequence
  Synthetically generated peptide
  VARIANT (5)..(6): Xaa = Any Amino Acid
  misc_feature (7)..(7): Xaa can be any naturally occurring amino acid
  misc_feature (10)..(10): Xaa can be any naturally occurring amino acid
CCEYXXXCCXNPACTGCY

SEQ ID NO: 2384 - protein, 18 aa, Artificial Sequence
  Synthetically generated peptide
  VARIANT (5)..(6): Xaa = Any Amino Acid
  misc_feature (7)..(7): Xaa can be any naturally occurring amino acid
  misc_feature (11)..(11): Xaa can be any naturally occurring amino acid
CCEYXXXCCNXPACTGCY

SEQ ID NO: 2385 - protein, 18 aa, Artificial Sequence
  Synthetically generated peptide
  VARIANT (5)..(6): Xaa = Any Amino Acid
  misc_feature (7)..(7): Xaa can be any naturally occurring amino acid
  misc_feature (12)..(12): Xaa can be any naturally occurring amino acid
CCEYXXXCCNPXACTGCY

SEQ ID NO: 2386 - protein, 18 aa, Artificial Sequence
  Synthetically generated peptide
  VARIANT (5)..(6): Xaa = Any Amino Acid
  misc_feature (7)..(7): Xaa can be any naturally occurring amino acid
  misc_feature (13)..(13): Xaa can be any naturally occurring amino acid
CCEYXXXCCNPAXCTGCY

SEQ ID NO: 2387 - protein, 18 aa, Artificial Sequence
  Synthetically generated peptide
  VARIANT (5)..(6): Xaa = Any Amino Acid
  misc_feature (7)..(7): Xaa can be any naturally occurring amino acid
  misc_feature (14)..(14): Xaa can be any naturally occurring amino acid
CCEYXXXCCNPACXTGCY

SEQ ID NO: 2388 - protein, 18 aa, Artificial Sequence
  Synthetically generated peptide
  VARIANT (5)..(6): Xaa = Any Amino Acid
  misc_feature (7)..(7): Xaa can be any naturally occurring amino acid
  misc_feature (15)..(15): Xaa can be any naturally occurring amino acid
CCEYXXXCCNPACTXGCY

SEQ ID NO: 2389 - protein, 18 aa, Artificial Sequence
  Synthetically generated peptide
  VARIANT (5)..(6): Xaa = Any Amino Acid
  misc_feature (7)..(7): Xaa can be any naturally occurring amino acid
  misc_feature (16)..(16): Xaa can be any naturally occurring amino acid
CCEYXXXCCNPACTGXCY

SEQ ID NO: 2390 - protein, 18 aa, Artificial Sequence
  Synthetically generated peptide
  VARIANT (5)..(6): Xaa = Any Amino Acid
  misc_feature (7)..(7): Xaa can be any naturally occurring amino acid
  misc_feature (17)..(17): Xaa can be any naturally occurring amino acid
CCEYXXXCCNPACTGCXY

SEQ ID NO: 2391 - protein, 17 aa, Artificial Sequence
  Synthetically generated peptide
  VARIANT (5)..(6): Xaa = Any Amino Acid
  misc_feature (9)..(9): Xaa can be any naturally occurring amino acid
CCEYXXCCXNPACTGCY

SEQ ID NO: 2392 - protein, 18 aa, Artificial Sequence
  Synthetically generated peptide
  VARIANT (5)..(6): Xaa = Any Amino Acid
  misc_feature (9)..(10): Xaa can be any naturally occurring amino acid
CCEYXXCCXXNPACTGCY

SEQ ID NO: 2393 - protein, 18 aa, Artificial Sequence
  Synthetically generated peptide
  VARIANT (5)..(6): Xaa = Any Amino Acid
  misc_feature (9)..(9): Xaa can be any naturally occurring amino acid
  misc_feature (11)..(11): Xaa can be any naturally occurring amino acid
CCEYXXCCXNXPACTGCY

SEQ ID NO: 2394 - protein, 18 aa, Artificial Sequence
  Synthetically generated peptide
  VARIANT (5)..(6): Xaa = Any Amino Acid
  misc_feature (9)..(9): Xaa can be any naturally occurring amino acid
  misc_feature (12)..(12): Xaa can be any naturally occurring amino acid
CCEYXXCCXNPXACTGCY

SEQ ID NO: 2395 - protein, 18 aa, Artificial Sequence
  Synthetically generated peptide
  VARIANT (5)..(6): Xaa = Any Amino Acid
  misc_feature (9)..(9): Xaa can be any naturally occurring amino acid
  misc_feature (13)..(13): Xaa can be any naturally occurring amino acid
CCEYXXCCXNPAXCTGCY

SEQ ID NO: 2396 - protein, 18 aa, Artificial Sequence
  Synthetically generated peptide
  VARIANT (5)..(6): Xaa = Any Amino Acid
  misc_feature (9)..(9): Xaa can be any naturally occurring amino acid
  misc_feature (14)..(14): Xaa can be any naturally occurring amino acid
CCEYXXCCXNPACXTGCY

SEQ ID NO: 2397 - protein, 18 aa, Artificial Sequence
  Synthetically generated peptide
  VARIANT (5)..(6): Xaa = Any Amino Acid
  misc_feature (9)..(9): Xaa can be any naturally occurring amino acid
  misc_feature (15)..(15): Xaa can be any naturally occurring amino acid
CCEYXXCCXNPACTXGCY

SEQ ID NO: 2398 - protein, 18 aa, Artificial Sequence
  Synthetically generated peptide
  VARIANT (5)..(6): Xaa = Any Amino Acid
  misc_feature (9)..(9): Xaa can be any naturally occurring amino acid
  misc_feature (16)..(16): Xaa can be any naturally occurring amino acid
CCEYXXCCXNPACTGXCY

SEQ ID NO: 2399 - protein, 18 aa, Artificial Sequence
  Synthetically generated peptide
  VARIANT (5)..(6): Xaa = Any Amino Acid
  misc_feature (9)..(9): Xaa can be any naturally occurring amino acid
  misc_feature (17)..(17): Xaa can be any naturally occurring amino acid
CCEYXXCCXNPACTGCXY

SEQ ID NO: 2400 - protein, 17 aa, Artificial Sequence
  Synthetically generated peptide
  VARIANT (5)..(6): Xaa = Any Amino Acid
  misc_feature (10)..(10): Xaa can be any naturally occurring amino acid
CCEYXXCCNXPACTGCY

SEQ ID NO: 2401 - protein, 18 aa, Artificial Sequence
  Synthetically generated peptide
  VARIANT (5)..(6): Xaa = Any Amino Acid
  misc_feature (10)..(11): Xaa can be any naturally occurring amino acid
CCEYXXCCNXXPACTGCY

SEQ ID NO: 2402 - protein, 18 aa, Artificial Sequence
  Synthetically generated peptide
  VARIANT (5)..(6): Xaa = Any Amino Acid
  misc_feature (10)..(10): Xaa can be any naturally occurring amino acid
  misc_feature (12)..(12): Xaa can be any naturally occurring amino acid
CCEYXXCCNXPXACTGCY

SEQ ID NO: 2403 - protein, 18 aa, Artificial Sequence
  Synthetically generated peptide
  VARIANT (5)..(6): Xaa = Any Amino Acid
  misc_feature (10)..(10): Xaa can be any naturally occurring amino acid
  misc_feature (13)..(13): Xaa can be any naturally occurring amino acid
CCEYXXCCNXPAXCTGCY

SEQ ID NO: 2404 - protein, 18 aa, Artificial Sequence
  Synthetically generated peptide
  VARIANT (5)..(6): Xaa = Any Amino Acid
  misc_feature (10)..(10): Xaa can be any naturally occurring amino acid
  misc_feature (14)..(14): Xaa can be any naturally occurring amino acid
CCEYXXCCNXPACXTGCY

SEQ ID NO: 2405 - protein, 18 aa, Artificial Sequence
  Synthetically generated peptide
  VARIANT (5)..(6): Xaa = Any Amino Acid
  misc_feature (10)..(10): Xaa can be any naturally occurring amino acid
  misc_feature (15)..(15): Xaa can be any naturally occurring amino acid
CCEYXXCCNXPACTXGCY

SEQ ID NO: 2406 - protein, 18 aa, Artificial Sequence
  Synthetically generated peptide
  VARIANT (5)..(6): Xaa = Any Amino Acid
  misc_feature (10)..(10): Xaa can be any naturally occurring amino acid
  misc_feature (16)..(16): Xaa can be any naturally occurring amino acid
CCEYXXCCNXPACTGXCY

SEQ ID NO: 2407 - protein, 18 aa, Artificial Sequence
  Synthetically generated peptide
  VARIANT (5)..(6): Xaa = Any Amino Acid
  misc_feature (10)..(10): Xaa can be any naturally occurring amino acid
  misc_feature (17)..(17): Xaa can be any naturally occurring amino acid
CCEYXXCCNXPACTGCXY

SEQ ID NO: 2408 - protein, 17 aa, Artificial Sequence
  Synthetically generated peptide
  VARIANT (5)..(6): Xaa = Any Amino Acid
  misc_feature (11)..(11): Xaa can be any naturally occurring amino acid
CCEYXXCCNPXACTGCY

SEQ ID NO: 2409 - protein, 18 aa, Artificial Sequence
  Synthetically generated peptide
  VARIANT (5)..(6): Xaa = Any Amino Acid
  misc_feature (11)..(12): Xaa can be any naturally occurring amino acid
CCEYXXCCNPXXACTGCY

SEQ ID NO: 2410 - protein, 18 aa, Artificial Sequence
  Synthetically generated peptide
  VARIANT (5)..(6): Xaa = Any Amino Acid
  misc_feature (11)..(11): Xaa can be any naturally occurring amino acid
  misc_feature (13)..(13): Xaa can be any naturally occurring amino acid
CCEYXXCCNPXAXCTGCY

SEQ ID NO: 2411 - protein, 18 aa, Artificial Sequence
  Synthetically generated peptide
  VARIANT (5)..(6): Xaa = Any Amino Acid
  misc_feature (11)..(11): Xaa can be any naturally occurring amino acid
  misc_feature (14)..(14): Xaa can be any naturally occurring amino acid
CCEYXXCCNPXACXTGCY

SEQ ID NO: 2412 - protein, 18 aa, Artificial Sequence
  Synthetically generated peptide
  VARIANT (5)..(6): Xaa = Any Amino Acid
  misc_feature (11)..(11): Xaa can be any naturally occurring amino acid
  misc_feature (15)..(15): Xaa can be any naturally occurring amino acid
CCEYXXCCNPXACTXGCY

SEQ ID NO: 2413 - protein, 18 aa, Artificial Sequence
  Synthetically generated peptide
  VARIANT (5)..(6): Xaa = Any Amino Acid
  misc_feature (11)..(11): Xaa can be any naturally occurring amino acid
  misc_feature (16)..(16): Xaa can be any naturally occurring amino acid
CCEYXXCCNPXACTGXCY

SEQ ID NO: 2414 - protein, 18 aa, Artificial Sequence
  Synthetically generated peptide
  VARIANT (5)..(6): Xaa = Any Amino Acid
  misc_feature (11)..(11): Xaa can be any naturally occurring amino acid
  misc_feature (17)..(17): Xaa can be any naturally occurring amino acid
CCEYXXCCNPXACTGCXY

SEQ ID NO: 2415 - protein, 17 aa, Artificial Sequence
  Synthetically generated peptide
  VARIANT (5)..(6): Xaa = Any Amino Acid
  misc_feature (12)..(12): Xaa can be any naturally occurring amino acid
CCEYXXCCNPAXCTGCY

SEQ ID NO: 2416 - protein, 18 aa, Artificial Sequence
  Synthetically generated peptide
  VARIANT (5)..(6): Xaa = Any Amino Acid
  misc_feature (12)..(13): Xaa can be any naturally occurring amino acid
CCEYXXCCNPAXXCTGCY

SEQ ID NO: 2417 - protein, 18 aa, Artificial Sequence
  Synthetically generated peptide
  VARIANT (5)..(6): Xaa = Any Amino Acid
  misc_feature (12)..(12): Xaa can be any naturally occurring amino acid
  misc_feature (14)..(14): Xaa can be any naturally occurring amino acid
CCEYXXCCNPAXCXTGCY

SEQ ID NO: 2418 - protein, 18 aa, Artificial Sequence
  Synthetically generated peptide
  VARIANT (5)..(6): Xaa = Any Amino Acid
  misc_feature (12)..(12): Xaa can be any naturally occurring amino acid
  misc_feature (15)..(15): Xaa can be any naturally occurring amino acid
CCEYXXCCNPAXCTXGCY

SEQ ID NO: 2419 - protein, 18 aa, Artificial Sequence
  Synthetically generated peptide
  VARIANT (5)..(6): Xaa = Any Amino Acid
  misc_feature (12)..(12): Xaa can be any naturally occurring amino acid
  misc_feature (16)..(16): Xaa can be any naturally occurring amino acid
CCEYXXCCNPAXCTGXCY

SEQ ID NO: 2420 - protein, 18 aa, Artificial Sequence
  Synthetically generated peptide
  VARIANT (5)..(6): Xaa = Any Amino Acid
  misc_feature (12)..(12): Xaa can be any naturally occurring amino acid
  misc_feature (17)..(17): Xaa can be any naturally occurring amino acid
CCEYXXCCNPAXCTGCXY

SEQ ID NO: 2421 - protein, 17 aa, Artificial Sequence
  Synthetically generated peptide
  VARIANT (5)..(6): Xaa = Any Amino Acid
  misc_feature (13)..(13): Xaa can be any naturally occurring amino acid
CCEYXXCCNPACXTGCY

SEQ ID NO: 2422 - protein, 18 aa, Artificial Sequence
  Synthetically generated peptide
  VARIANT (5)..(6): Xaa = Any Amino Acid
  misc_feature (13)..(14): Xaa can be any naturally occurring amino acid
CCEYXXCCNPACXXTGCY

SEQ ID NO: 2423 - protein, 18 aa, Artificial Sequence
  Synthetically generated peptide
  VARIANT (5)..(6): Xaa = Any Amino Acid
  misc_feature (13)..(13): Xaa can be any naturally occurring amino acid
  misc_feature (15)..(15): Xaa can be any naturally occurring amino acid
CCEYXXCCNPACXTXGCY

SEQ ID NO: 2424 - protein, 18 aa, Artificial Sequence
  Synthetically generated peptide
  VARIANT (5)..(6): Xaa = Any Amino Acid
  misc_feature (13)..(13): Xaa can be any naturally occurring amino acid
  misc_feature (16)..(16): Xaa can be any naturally occurring amino acid
CCEYXXCCNPACXTGXCY

SEQ ID NO: 2425 - protein, 18 aa, Artificial Sequence
  Synthetically generated peptide
  VARIANT (5)..(6): Xaa = Any Amino Acid
  misc_feature (13)..(13): Xaa can be any naturally occurring amino acid
  misc_feature (17)..(17): Xaa can be any naturally occurring amino acid
CCEYXXCCNPACXTGCXY

SEQ ID NO: 2426 - protein, 17 aa, Artificial Sequence
  Synthetically generated peptide
  VARIANT (5)..(6): Xaa = Any Amino Acid
  misc_feature (14)..(14): Xaa can be any naturally occurring amino acid
CCEYXXCCNPACTXGCY

SEQ ID NO: 2427 - protein, 18 aa, Artificial Sequence
  Synthetically generated peptide
  VARIANT (5)..(6): Xaa = Any Amino Acid
  misc_feature (14)..(15): Xaa can be any naturally occurring amino acid
CCEYXXCCNPACTXXGCY

SEQ ID NO: 2428 - protein, 18 aa, Artificial Sequence
  Synthetically generated peptide
  VARIANT (5)..(6): Xaa = Any Amino Acid
  misc_feature (14)..(14): Xaa can be any naturally occurring amino acid
  misc_feature (16)..(16): Xaa can be any naturally occurring amino acid
CCEYXXCCNPACTXGXCY

SEQ ID NO: 2429 - protein, 18 aa, Artificial Sequence
  Synthetically generated peptide
  VARIANT (5)..(6): Xaa = Any Amino Acid
  misc_feature (14)..(14): Xaa can be any naturally occurring amino acid
  misc_feature (17)..(17): Xaa can be any naturally occurring amino acid
CCEYXXCCNPACTXGCXY

SEQ ID NO: 2430 - protein, 17 aa, Artificial Sequence
  Synthetically generated peptide
  VARIANT (5)..(6): Xaa = Any Amino Acid
  misc_feature (15)..(15): Xaa can be any naturally occurring amino acid
CCEYXXCCNPACTGXCY

SEQ ID NO: 2431 - protein, 18 aa, Artificial Sequence
  Synthetically generated peptide
  VARIANT (5)..(6): Xaa = Any Amino Acid
  misc_feature (15)..(16): Xaa can be any naturally occurring amino acid
CCEYXXCCNPACTGXXCY

SEQ ID NO: 2432 - protein, 18 aa, Artificial Sequence
  Synthetically generated peptide
  VARIANT (5)..(6): Xaa = Any Amino Acid
  misc_feature (15)..(15): Xaa can be any naturally occurring amino acid
  misc_feature (17)..(17): Xaa can be any naturally occurring amino acid
CCEYXXCCNPACTGXCXY

SEQ ID NO: 2433 - protein, 17 aa, Artificial Sequence
  Synthetically generated peptide
  VARIANT (5)..(6): Xaa = Any Amino Acid
  misc_feature (16)..(16): Xaa can be any naturally occurring amino acid
CCEYXXCCNPACTGCXY

SEQ ID NO: 2434 - protein, 18 aa, Artificial Sequence
  Synthetically generated peptide
  VARIANT (5)..(6): Xaa = Any Amino Acid
  misc_feature (16)..(17): Xaa can be any naturally occurring amino acid
CCEYXXCCNPACTGCXXY

SEQ ID NO: 2435 - protein, 16 aa, Artificial Sequence
  Synthetically generated peptide
  VARIANT (5)..(8): Xaa = Any Amino Acid
CCEYXCCXNPACTGCY

SEQ ID NO: 2436 - protein, 17 aa, Artificial Sequence
  Synthetically generated peptide
  VARIANT (5)..(8): Xaa = Any Amino Acid
  misc_feature (9)..(9): Xaa can be any naturally occurring amino acid
CCEYXCCXXNPACTGCY

SEQ ID NO: 2437 - protein, 18 aa, Artificial Sequence
  Synthetically generated peptide
  VARIANT (5)..(8): Xaa = Any Amino Acid
  misc_feature (9)..(10): Xaa can be any naturally occurring amino acid
CCEYXCCXXXNPACTGCY

SEQ ID NO: 2438 - protein, 18 aa, Artificial Sequence
  Synthetically generated peptide
  VARIANT (5)..(8): Xaa = Any Amino Acid
  misc_feature (9)..(9): Xaa can be any naturally occurring amino acid
  misc_feature (11)..(11): Xaa can be any naturally occurring amino acid
CCEYXCCXXNXPACTGCY

SEQ ID NO: 2439 - protein, 18 aa, Artificial Sequence
  Synthetically generated peptide
  VARIANT (5)..(8): Xaa = Any Amino Acid
  misc_feature (9)..(9): Xaa can be any naturally occurring amino acid
  misc_feature (12)..(12): Xaa can be any naturally occurring amino acid
CCEYXCCXXNPXACTGCY

SEQ ID NO: 2440 - protein, 18 aa, Artificial Sequence
  Synthetically generated peptide
  VARIANT (5)..(8): Xaa = Any Amino Acid
  misc_feature (9)..(9): Xaa can be any naturally occurring amino acid
  misc_feature (13)..(13): Xaa can be any naturally occurring amino acid
CCEYXCCXXNPAXCTGCY

SEQ ID NO: 2441 - protein, 18 aa, Artificial Sequence
  Synthetically generated peptide
  VARIANT (5)..(8): Xaa = Any Amino Acid
  misc_feature (9)..(9): Xaa can be any naturally occurring amino acid
  misc_feature (14)..(14): Xaa can be any naturally occurring amino acid
CCEYXCCXXNPACXTGCY

SEQ ID NO: 2442 - protein, 18 aa, Artificial Sequence
  Synthetically generated peptide
  VARIANT (5)..(8): Xaa = Any Amino Acid
  misc_feature (9)..(9): Xaa can be any naturally occurring amino acid
  misc_feature (15)..(15): Xaa can be any naturally occurring amino acid
CCEYXCCXXNPACTXGCY

SEQ ID NO: 2443 - protein, 18 aa, Artificial Sequence
  Synthetically generated peptide
  VARIANT (5)..(8): Xaa = Any Amino Acid
  misc_feature (9)..(9): Xaa can be any naturally occurring amino acid
  misc_feature (16)..(16): Xaa can be any naturally occurring amino acid
CCEYXCCXXNPACTGXCY

SEQ ID NO: 2444 - protein, 18 aa, Artificial Sequence
  Synthetically generated peptide
  VARIANT (5)..(8): Xaa = Any Amino Acid
  misc_feature (9)..(9): Xaa can be any naturally occurring amino acid
  misc_feature (17)..(17): Xaa can be any naturally occurring amino acid
CCEYXCCXXNPACTGCXY

SEQ ID NO: 2445 - protein, 17 aa, Artificial Sequence
  Synthetically generated peptide
  VARIANT (5)..(8): Xaa = Any Amino Acid
  misc_feature (10)..(10): Xaa can be any naturally occurring amino acid
CCEYXCCXNXPACTGCY

SEQ ID NO: 2446 - protein, 18 aa, Artificial Sequence
  Synthetically generated peptide
  VARIANT (5)..(8): Xaa = Any Amino Acid
  misc_feature (10)..(11): Xaa can be any naturally occurring amino acid
CCEYXCCXNXXPACTGCY

SEQ ID NO: 2447 - protein, 18 aa, Artificial Sequence
  Synthetically generated peptide
  VARIANT (5)..(8): Xaa = Any Amino Acid
  misc_feature (10)..(10): Xaa can be any naturally occurring amino acid
  misc_feature (12)..(12): Xaa can be any naturally occurring amino acid
CCEYXCCXNXPXACTGCY

SEQ ID NO: 2448 - protein, 18 aa, Artificial Sequence
  Synthetically generated peptide
  VARIANT (5)..(8): Xaa = Any Amino Acid
  misc_feature (10)..(10): Xaa can be any naturally occurring amino acid
  misc_feature (13)..(13): Xaa can be any naturally occurring amino acid
CCEYXCCXNXPAXCTGCY

SEQ ID NO: 2449 - protein, 18 aa, Artificial Sequence
  Synthetically generated peptide
  VARIANT (5)..(8): Xaa = Any Amino Acid
  misc_feature (10)..(10): Xaa can be any naturally occurring amino acid
  misc_feature (14)..(14): Xaa can be any naturally occurring amino acid
CCEYXCCXNXPACXTGCY

SEQ ID NO: 2450 - protein, 18 aa, Artificial Sequence
  Synthetically generated peptide
  VARIANT (5)..(8): Xaa = Any Amino Acid
  misc_feature (10)..(10): Xaa can be any naturally occurring amino acid
  misc_feature (15)..(15): Xaa can be any naturally occurring amino acid
CCEYXCCXNXPACTXGCY

SEQ ID NO: 2451 - protein, 18 aa, Artificial Sequence
  Synthetically generated peptide
  VARIANT (5)..(8): Xaa = Any Amino Acid
  misc_feature (10)..(10): Xaa can be any naturally occurring amino acid
  misc_feature (16)..(16): Xaa can be any naturally occurring amino acid
CCEYXCCXNXPACTGXCY

SEQ ID NO: 2452 - protein, 18 aa, Artificial Sequence
  Synthetically generated peptide
  VARIANT (5)..(8): Xaa = Any Amino Acid
  misc_feature (10)..(10): Xaa can be any naturally occurring amino acid
  misc_feature (17)..(17): Xaa can be any naturally occurring amino acid
CCEYXCCXNXPACTGCXY

SEQ ID NO: 2453 - protein, 17 aa, Artificial Sequence
  Synthetically generated peptide
  VARIANT (5)..(8): Xaa = Any Amino Acid
  misc_feature (11)..(11): Xaa can be any naturally occurring amino acid
CCEYXCCXNPXACTGCY

SEQ ID NO: 2454 - protein, 18 aa, Artificial Sequence
  Synthetically generated peptide
  VARIANT (5)..(8): Xaa = Any Amino Acid
  misc_feature (11)..(12): Xaa can be any naturally occurring amino acid
CCEYXCCXNPXXACTGCY

SEQ ID NO: 2455 - protein, 18 aa, Artificial Sequence
  Synthetically generated peptide
  VARIANT (5)..(8): Xaa = Any Amino Acid
  misc_feature (11)..(11): Xaa can be any naturally occurring amino acid
  misc_feature (13)..(13): Xaa can be any naturally occurring amino acid
CCEYXCCXNPXAXCTGCY

SEQ ID NO: 2456 - protein, 18 aa, Artificial Sequence
  Synthetically generated peptide
  VARIANT (5)..(8): Xaa = Any Amino Acid
  misc_feature (11)..(11): Xaa can be any naturally occurring amino acid
  misc_feature (14)..(14): Xaa can be any naturally occurring amino acid
CCEYXCCXNPXACXTGCY

SEQ ID NO: 2457 - protein, 18 aa, Artificial Sequence
  Synthetically generated peptide
  VARIANT (5)..(8): Xaa = Any Amino Acid
  misc_feature (11)..(11): Xaa can be any naturally occurring amino acid
  misc_feature (15)..(15): Xaa can be any naturally occurring amino acid
CCEYXCCXNPXACTXGCY

SEQ ID NO: 2458 - protein, 18 aa, Artificial Sequence
  Synthetically generated peptide
  VARIANT (5)..(8): Xaa = Any Amino Acid
  misc_feature (11)..(11): Xaa can be any naturally occurring amino acid
  misc_feature (16)..(16): Xaa can be any naturally occurring amino acid
CCEYXCCXNPXACTGXCY

SEQ ID NO: 2459 - protein, 18 aa, Artificial Sequence
  Synthetically generated peptide
  VARIANT (5)..(8): Xaa = Any Amino Acid
  misc_feature (11)..(11): Xaa can be any naturally occurring amino acid
  misc_feature (17)..(17): Xaa can be any naturally occurring amino acid
CCEYXCCXNPXACTGCXY

SEQ ID NO: 2460 - protein, 17 aa, Artificial Sequence
  Synthetically generated peptide
  VARIANT (5)..(8): Xaa = Any Amino Acid
  misc_feature (12)..(12): Xaa can be any naturally occurring amino acid
CCEYXCCXNPAXCTGCY

SEQ ID NO: 2461 - protein, 18 aa, Artificial Sequence
  Synthetically generated peptide
  VARIANT (5)..(8): Xaa = Any Amino Acid
  misc_feature (12)..(13): Xaa can be any naturally occurring amino acid
CCEYXCCXNPAXXCTGCY

SEQ ID NO: 2462 - protein, 18 aa, Artificial Sequence
  Synthetically generated peptide
  VARIANT (5)..(8): Xaa = Any Amino Acid
  misc_feature (12)..(12): Xaa can be any naturally occurring amino acid
  misc_feature (14)..(14): Xaa can be any naturally occurring amino acid
CCEYXCCXNPAXCXTGCY

SEQ ID NO: 2463 - protein, 18 aa, Artificial Sequence
  Synthetically generated peptide
  VARIANT (5)..(8): Xaa = Any Amino Acid
  misc_feature (12)..(12): Xaa can be any naturally occurring amino acid
  misc_feature (15)..(15): Xaa can be any naturally occurring amino acid
CCEYXCCXNPAXCTXGCY

SEQ ID NO: 2464 - protein, 18 aa, Artificial Sequence
  Synthetically generated peptide
  VARIANT (5)..(8): Xaa = Any Amino Acid
  misc_feature (12)..(12): Xaa can be any naturally occurring amino acid
  misc_feature (16)..(16): Xaa can be any naturally occurring amino acid
CCEYXCCXNPAXCTGXCY

SEQ ID NO: 2465 - protein, 18 aa, Artificial Sequence
  Synthetically generated peptide
  VARIANT (5)..(8): Xaa = Any Amino Acid
  misc_feature (12)..(12): Xaa can be any naturally occurring amino acid
  misc_feature (17)..(17): Xaa can be any naturally occurring amino acid
CCEYXCCXNPAXCTGCXY

SEQ ID NO: 2466 - protein, 17 aa, Artificial Sequence
  Synthetically generated peptide
  VARIANT (5)..(8): Xaa = Any Amino Acid
  misc_feature (13)..(13): Xaa can be any naturally occurring amino acid
CCEYXCCXNPACXTGCY

SEQ ID NO: 2467 - protein, 18 aa, Artificial Sequence
  Synthetically generated peptide
  VARIANT (5)..(8): Xaa = Any Amino Acid
  misc_feature (13)..(14): Xaa can be any naturally occurring amino acid
CCEYXCCXNPACXXTGCY

SEQ ID NO: 2468 - protein, 18 aa, Artificial Sequence
  Synthetically generated peptide
  VARIANT (5)..(8): Xaa = Any Amino Acid
  misc_feature (13)..(13): Xaa can be any naturally occurring amino acid
  misc_feature (15)..(15): Xaa can be any naturally occurring amino acid
CCEYXCCXNPACXTXGCY

SEQ ID NO: 2469 - protein, 18 aa, Artificial Sequence
  Synthetically generated peptide
  VARIANT (5)..(8): Xaa = Any Amino Acid
  misc_feature (13)..(13): Xaa can be any naturally occurring amino acid
  misc_feature (16)..(16): Xaa can be any naturally occurring amino acid
CCEYXCCXNPACXTGXCY

SEQ ID NO: 2470 - protein, 18 aa, Artificial Sequence
  Synthetically generated peptide
  VARIANT (5)..(8): Xaa = Any Amino Acid
  misc_feature (13)..(13): Xaa can be any naturally occurring amino acid
  misc_feature (17)..(17): Xaa can be any naturally occurring amino acid
CCEYXCCXNPACXTGCXY

SEQ ID NO: 2471 - protein, 17 aa, Artificial Sequence
  Synthetically generated peptide
  VARIANT (5)..(8): Xaa = Any Amino Acid
  misc_feature (14)..(14): Xaa can be any naturally occurring amino acid
CCEYXCCXNPACTXGCY

SEQ ID NO: 2472 - protein, 18 aa, Artificial Sequence
  Synthetically generated peptide
  VARIANT (5)..(8): Xaa = Any Amino Acid
  misc_feature (14)..(15): Xaa can be any naturally occurring amino acid
CCEYXCCXNPACTXXGCY

SEQ ID NO: 2473 - protein, 18 aa, Artificial Sequence
  Synthetically generated peptide
  VARIANT (5)..(8): Xaa = Any Amino Acid
  misc_feature (14)..(14): Xaa can be any naturally occurring amino acid
  misc_feature (16)..(16): Xaa can be any naturally occurring amino acid
CCEYXCCXNPACTXGXCY

SEQ ID NO: 2474 - protein, 18 aa, Artificial Sequence
  Synthetically generated peptide
  VARIANT (5)..(8): Xaa = Any Amino Acid
  misc_feature (14)..(14): Xaa can be any naturally occurring amino acid
  misc_feature (17)..(17): Xaa can be any naturally occurring amino acid
CCEYXCCXNPACTXGCXY

SEQ ID NO: 2475 - protein, 17 aa, Artificial Sequence
  Synthetically generated peptide
  VARIANT (5)..(8): Xaa = Any Amino Acid
  misc_feature (15)..(15): Xaa can be any naturally occurring amino acid
CCEYXCCXNPACTGXCY

SEQ ID NO: 2476 - protein, 18 aa, Artificial Sequence
  Synthetically generated peptide
  VARIANT (5)..(8): Xaa = Any Amino Acid
  misc_feature (15)..(16): Xaa can be any naturally occurring amino acid
CCEYXCCXNPACTGXXCY

SEQ ID NO: 2477 - protein, 18 aa, Artificial Sequence
  Synthetically generated peptide
  VARIANT (5)..(8): Xaa = Any Amino Acid
  misc_feature (15)..(15): Xaa can be any naturally occurring amino acid
  misc_feature (17)..(17): Xaa can be any naturally occurring amino acid
CCEYXCCXNPACTGXCXY

SEQ ID NO: 2478 - protein, 17 aa, Artificial Sequence
  Synthetically generated peptide
  VARIANT (5)..(8): Xaa = Any Amino Acid
  misc_feature (16)..(16): Xaa can be any naturally occurring amino acid
CCEYXCCXNPACTGCXY

SEQ ID NO: 2479 - protein, 18 aa, Artificial Sequence
  Synthetically generated peptide
  VARIANT (5)..(8): Xaa = Any Amino Acid
  misc_feature (16)..(17): Xaa can be any naturally occurring amino acid
CCEYXCCXNPACTGCXXY

SEQ ID NO: 2480 - protein, 16 aa, Artificial Sequence
  Synthetically generated peptide
  VARIANT (5)..(9): Xaa = Any Amino Acid
CCEYXCCNXPACTGCY

SEQ ID NO: 2481 - protein, 17 aa, Artificial Sequence
  Synthetically generated peptide
  VARIANT (5)..(9): Xaa = Any Amino Acid
  misc_feature (10)..(10): Xaa can be any naturally occurring amino acid
CCEYXCCNXXPACTGCY

SEQ ID NO: 2482 - protein, 18 aa, Artificial Sequence
  Synthetically generated peptide
  VARIANT (5)..(9): Xaa = Any Amino Acid
  misc_feature (10)..(11): Xaa can be any naturally occurring amino acid
CCEYXCCNXXXPACTGCY

SEQ ID NO: 2483 - protein, 18 aa, Artificial Sequence
  Synthetically generated peptide
  VARIANT (5)..(9): Xaa = Any Amino Acid
  misc_feature (10)..(10): Xaa can be any naturally occurring amino acid
  misc_feature (12)..(12): Xaa can be any naturally occurring amino acid
CCEYXCCNXXPXACTGCY

SEQ ID NO: 2484 - protein, 18 aa, Artificial Sequence
  Synthetically generated peptide
  VARIANT (5)..(9): Xaa = Any Amino Acid
  misc_feature (10)..(10): Xaa can be any naturally occurring amino acid
  misc_feature (13)..(13): Xaa can be any naturally occurring amino acid
CCEYXCCNXXPAXCTGCY

SEQ ID NO: 2485 - protein, 18 aa, Artificial Sequence
  Synthetically generated peptide
  VARIANT (5)..(9): Xaa = Any Amino Acid
  misc_feature (10)..(10): Xaa can be any naturally occurring amino acid
  misc_feature (14)..(14): Xaa can be any naturally occurring amino acid
CCEYXCCNXXPACXTGCY

SEQ ID NO: 2486 - protein, 18 aa, Artificial Sequence
  Synthetically generated peptide
  VARIANT (5)..(9): Xaa = Any Amino Acid
  misc_feature (10)..(10): Xaa can be any naturally occurring amino acid
  misc_feature (15)..(15): Xaa can be any naturally occurring amino acid
CCEYXCCNXXPACTXGCY

SEQ ID NO: 2487 - protein, 18 aa, Artificial Sequence
  Synthetically generated peptide
  VARIANT (5)..(9): Xaa = Any Amino Acid
  misc_feature (10)..(10): Xaa can be any naturally occurring amino acid
  misc_feature (16)..(16): Xaa can be any naturally occurring amino acid
CCEYXCCNXXPACTGXCY

SEQ ID NO: 2488 - protein, 18 aa, Artificial Sequence
  Synthetically generated peptide
  VARIANT (5)..(9): Xaa = Any Amino Acid
  misc_feature (10)..(10): Xaa can be any naturally occurring amino acid
  misc_feature (17)..(17): Xaa can be any naturally occurring amino acid
CCEYXCCNXXPACTGCXY

SEQ ID NO: 2489 - protein, 17 aa, Artificial Sequence
  Synthetically generated peptide
  VARIANT (5)..(9): Xaa = Any Amino Acid
  misc_feature (11)..(11): Xaa can be any naturally occurring amino acid
CCEYXCCNXPXACTGCY

SEQ ID NO: 2490 - protein, 18 aa, Artificial Sequence
  Synthetically generated peptide
  VARIANT (5)..(9): Xaa = Any Amino Acid
  misc_feature (11)..(12): Xaa can be any naturally occurring amino acid
CCEYXCCNXPXXACTGCY

SEQ ID NO: 2491 - protein, 18 aa, Artificial Sequence
  Synthetically generated peptide
  VARIANT (5)..(9): Xaa = Any Amino Acid
  misc_feature (11)..(11): Xaa can be any naturally occurring amino acid
  misc_feature (13)..(13): Xaa can be any naturally occurring amino acid
CCEYXCCNXPXAXCTGCY

SEQ ID NO: 2492 - protein, 18 aa, Artificial Sequence
  Synthetically generated peptide
  VARIANT (5)..(9): Xaa = Any Amino Acid
  misc_feature (11)..(11): Xaa can be any naturally occurring amino acid
  misc_feature (14)..(14): Xaa can be any naturally occurring amino acid
CCEYXCCNXPXACXTGCY

SEQ ID NO: 2493 - protein, 18 aa, Artificial Sequence
  Synthetically generated peptide
  VARIANT (5)..(9): Xaa = Any Amino Acid
  misc_feature (11)..(11): Xaa can be any naturally occurring amino acid
  misc_feature (15)..(15): Xaa can be any naturally occurring amino acid
CCEYXCCNXPXACTXGCY

SEQ ID NO: 2494 - protein, 18 aa, Artificial Sequence
  Synthetically generated peptide
  VARIANT (5)..(9): Xaa = Any Amino Acid
  misc_feature (11)..(11): Xaa can be any naturally occurring amino acid
  misc_feature (16)..(16): Xaa can be any naturally occurring amino acid
CCEYXCCNXPXACTGXCY

SEQ ID NO: 2495 - protein, 18 aa, Artificial Sequence
  Synthetically generated peptide
  VARIANT (5)..(9): Xaa = Any Amino Acid
  misc_feature (11)..(11): Xaa can be any naturally occurring amino acid
  misc_feature (17)..(17): Xaa can be any naturally occurring amino acid
CCEYXCCNXPXACTGCXY

SEQ ID NO: 2496 - protein, 17 aa, Artificial Sequence
  Synthetically generated peptide
  VARIANT (5)..(9): Xaa = Any Amino Acid
  misc_feature (12)..(12): Xaa can be any naturally occurring amino acid
CCEYXCCNXPAXCTGCY

SEQ ID NO: 2497 - protein, 18 aa, Artificial Sequence
  Synthetically generated peptide
  VARIANT (5)..(9): Xaa = Any Amino Acid
  misc_feature (12)..(13): Xaa can be any naturally occurring amino acid
CCEYXCCNXPAXXCTGCY

SEQ ID NO: 2498 - protein, 18 aa, Artificial Sequence
  Synthetically generated peptide
  VARIANT (5)..(9): Xaa = Any Amino Acid
  misc_feature (12)..(12): Xaa can be any naturally occurring amino acid
  misc_feature (14)..(14): Xaa can be any naturally occurring amino acid
CCEYXCCNXPAXCXTGCY

SEQ ID NO: 2499 - protein, 18 aa, Artificial Sequence
  Synthetically generated peptide
  VARIANT (5)..(9): Xaa = Any Amino Acid
  misc_feature (12)..(12): Xaa can be any naturally occurring amino acid
  misc_feature (15)..(15): Xaa can be any naturally occurring amino acid
CCEYXCCNXPAXCTXGCY

SEQ ID NO: 2500 - protein, 18 aa, Artificial Sequence
  Synthetically generated peptide
  VARIANT (5)..(9): Xaa = Any Amino Acid
  misc_feature (12)..(12): Xaa can be any naturally occurring amino acid
  misc_feature (16)..(16): Xaa can be any naturally occurring amino acid
CCEYXCCNXPAXCTGXCY

SEQ ID NO: 2501 - protein, 18 aa, Artificial Sequence
  Synthetically generated peptide
  VARIANT (5)..(9): Xaa = Any Amino Acid
  misc_feature (12)..(12): Xaa can be any naturally occurring amino acid
  misc_feature (17)..(17): Xaa can be any naturally occurring amino acid
CCEYXCCNXPAXCTGCXY

SEQ ID NO: 2502 - protein, 17 aa, Artificial Sequence
  Synthetically generated peptide
  VARIANT (5)..(9): Xaa = Any Amino Acid
  misc_feature (13)..(13): Xaa can be any naturally occurring amino acid
CCEYXCCNXPACXTGCY

SEQ ID NO: 2503 - protein, 18 aa, Artificial Sequence
  Synthetically generated peptide
  VARIANT (5)..(9): Xaa = Any Amino Acid
  misc_feature (13)..(14): Xaa can be any naturally occurring amino acid
CCEYXCCNXPACXXTGCY

SEQ ID NO: 2504 - protein, 18 aa, Artificial Sequence
  Synthetically generated peptide
  VARIANT (5)..(9): Xaa = Any Amino Acid
  misc_feature (13)..(13): Xaa can be any naturally occurring amino acid
  misc_feature (15)..(15): Xaa can be any naturally occurring amino acid
CCEYXCCNXPACXTXGCY

SEQ ID NO: 2505 - protein, 18 aa, Artificial Sequence
  Synthetically generated peptide
  VARIANT (5)..(9): Xaa = Any Amino Acid
  misc_feature (13)..(13): Xaa can be any naturally occurring amino acid
  misc_feature (16)..(16): Xaa can be any naturally occurring amino acid
CCEYXCCNXPACXTGXCY

SEQ ID NO: 2506 - protein, 18 aa, Artificial Sequence
  Synthetically generated peptide
  VARIANT (5)..(9): Xaa = Any Amino Acid
  misc_feature (13)..(13): Xaa can be any naturally occurring amino acid
  misc_feature (17)..(17): Xaa can be any naturally occurring amino acid
CCEYXCCNXPACXTGCXY

SEQ ID NO: 2507 - protein, 17 aa, Artificial Sequence
  Synthetically generated peptide
  VARIANT (5)..(9): Xaa = Any Amino Acid
  misc_feature (14)..(14): Xaa can be any naturally occurring amino acid
CCEYXCCNXPACTXGCY

SEQ ID NO: 2508 - protein, 18 aa, Artificial Sequence
  Synthetically generated peptide
  VARIANT (5)..(9): Xaa = Any Amino Acid
  misc_feature (14)..(15): Xaa can be any naturally occurring amino acid
CCEYXCCNXPACTXXGCY

SEQ ID NO: 2509 - protein, 18 aa, Artificial Sequence
  Synthetically generated peptide
  VARIANT (5)..(9): Xaa = Any Amino Acid
  misc_feature (14)..(14): Xaa can be any naturally occurring amino acid
  misc_feature (16)..(16): Xaa can be any naturally occurring amino acid
CCEYXCCNXPACTXGXCY

SEQ ID NO: 2510 - protein, 18 aa, Artificial Sequence
  Synthetically generated peptide
  VARIANT (5)..(9): Xaa = Any Amino Acid
  misc_feature (14)..(14): Xaa can be any naturally occurring amino acid
  misc_feature (17)..(17): Xaa can be any naturally occurring amino acid
CCEYXCCNXPACTXGCXY

SEQ ID NO: 2511 - protein, 17 aa, Artificial Sequence
  Synthetically generated peptide
  VARIANT (5)..(9): Xaa = Any Amino Acid
  misc_feature (15)..(15): Xaa can be any naturally occurring amino acid
CCEYXCCNXPACTGXCY

SEQ ID NO: 2512 - protein, 18 aa, Artificial Sequence
  Synthetically generated peptide
  VARIANT (5)..(9): Xaa = Any Amino Acid
  misc_feature (15)..(16): Xaa can be any naturally occurring amino acid
CCEYXCCNXPACTGXXCY

SEQ ID NO: 2513 - protein, 18 aa, Artificial Sequence
  Synthetically generated peptide
  VARIANT (5)..(9): Xaa = Any Amino Acid
  misc_feature (15)..(15): Xaa can be any naturally occurring amino acid
  misc_feature (17)..(17): Xaa can be any naturally occurring amino acid
CCEYXCCNXPACTGXCXY

SEQ ID NO: 2514 - protein, 17 aa, Artificial Sequence
  Synthetically generated peptide
  VARIANT (5)..(9): Xaa = Any Amino Acid
  misc_feature (16)..(16): Xaa can be any naturally occurring amino acid
CCEYXCCNXPACTGCXY

SEQ ID NO: 2515 - protein, 18 aa, Artificial Sequence
  Synthetically generated peptide
  VARIANT (5)..(9): Xaa = Any Amino Acid
  misc_feature (16)..(17): Xaa can be any naturally occurring amino acid
CCEYXCCNXPACTGCXXY

SEQ ID NO: 2516 - protein, 16 aa, Artificial Sequence
  Synthetically generated peptide
  VARIANT (5)..(10): Xaa = Any Amino Acid
CCEYXCCNPXACTGCY

SEQ ID NO: 2517 - protein, 17 aa, Artificial Sequence
  Synthetically generated peptide
  VARIANT (5)..(10): Xaa = Any Amino Acid
  misc_feature (11)..(11): Xaa can be any naturally occurring amino acid
CCEYXCCNPXXACTGCY

SEQ ID NO: 2518 - protein, 18 aa, Artificial Sequence
  Synthetically generated peptide
  VARIANT (5)..(10): Xaa = Any Amino Acid
  misc_feature (11)..(12): Xaa can be any naturally occurring amino acid
CCEYXCCNPXXXACTGCY

SEQ ID NO: 2519 - protein, 18 aa, Artificial Sequence
  Synthetically generated peptide
  VARIANT (5)..(10): Xaa = Any Amino Acid
  misc_feature (11)..(11): Xaa can be any naturally occurring amino acid
  misc_feature (13)..(13): Xaa can be any naturally occurring amino acid
CCEYXCCNPXXAXCTGCY

SEQ ID NO: 2520 - protein, 18 aa, Artificial Sequence
  Synthetically generated peptide
  VARIANT (5)..(10): Xaa = Any Amino Acid
  misc_feature (11)..(11): Xaa can be any naturally occurring amino acid
  misc_feature (14)..(14): Xaa can be any naturally occurring amino acid
CCEYXCCNPXXACXTGCY

SEQ ID NO: 2521 - protein, 18 aa, Artificial Sequence
  Synthetically generated peptide
  VARIANT (5)..(10): Xaa = Any Amino Acid
  misc_feature (11)..(11): Xaa can be any naturally occurring amino acid
  misc_feature (15)..(15): Xaa can be any naturally occurring amino acid
CCEYXCCNPXXACTXGCY

SEQ ID NO: 2522 - protein, 18 aa, Artificial Sequence
  Synthetically generated peptide
  VARIANT (5)..(10): Xaa = Any Amino Acid
  misc_feature (11)..(11): Xaa can be any naturally occurring amino acid
  misc_feature (16)..(16): Xaa can be any naturally occurring amino acid
CCEYXCCNPXXACTGXCY

SEQ ID NO: 2523 - protein, 18 aa, Artificial Sequence
  Synthetically generated peptide
  VARIANT (5)..(10): Xaa = Any Amino Acid
  misc_feature (11)..(11): Xaa can be any naturally occurring amino acid
  misc_feature (17)..(17): Xaa can be any naturally occurring amino acid
CCEYXCCNPXXACTGCXY

SEQ ID NO: 2524 - protein, 17 aa, Artificial Sequence
  Synthetically generated peptide
  VARIANT (5)..(10): Xaa = Any Amino Acid
  misc_feature (12)..(12): Xaa can be any naturally occurring amino acid
CCEYXCCNPXAXCTGCY

SEQ ID NO: 2525 - protein, 18 aa, Artificial Sequence
  Synthetically generated peptide
  VARIANT (5)..(10): Xaa = Any Amino Acid
  misc_feature (12)..(13): Xaa can be any naturally occurring amino acid
CCEYXCCNPXAXXCTGCY

SEQ ID NO: 2526 - protein, 18 aa, Artificial Sequence
  Synthetically generated peptide
  VARIANT (5)..(10): Xaa = Any Amino Acid
  misc_feature (12)..(12): Xaa can be any naturally occurring amino acid
  misc_feature (14)..(14): Xaa can be any naturally occurring amino acid
CCEYXCCNPXAXCXTGCY

SEQ ID NO: 2527 - protein, 18 aa, Artificial Sequence
  Synthetically generated peptide
  VARIANT (5)..(10): Xaa = Any Amino Acid
  misc_feature (12)..(12): Xaa can be any naturally occurring amino acid
  misc_feature (15)..(15): Xaa can be any naturally occurring amino acid
CCEYXCCNPXAXCTXGCY

SEQ ID NO: 2528 - protein, 18 aa, Artificial Sequence
  Synthetically generated peptide
  VARIANT (5)..(10): Xaa = Any Amino Acid
  misc_feature (12)..(12): Xaa can be any naturally occurring amino acid
  misc_feature (16)..(16): Xaa can be any naturally occurring amino acid
CCEYXCCNPXAXCTGXCY

SEQ ID NO: 2529 - protein, 17 aa, Artificial Sequence
  Synthetically generated peptide
  VARIANT (5)..(10): Xaa = Any Amino Acid
  misc_feature (13)..(13): Xaa can be any naturally occurring amino acid
CCEYXCCNPXACXTGCY

SEQ ID NO: 2530 - protein, 18 aa, Artificial Sequence
  Synthetically generated peptide
  VARIANT (5)..(10): Xaa = Any Amino Acid
  misc_feature (13)..(14): Xaa can be any naturally occurring amino acid
CCEYXCCNPXACXXTGCY

SEQ ID NO: 2531 - protein, 18 aa, Artificial Sequence
  Synthetically generated peptide
  VARIANT (5)..(10): Xaa = Any Amino Acid
  misc_feature (13)..(13): Xaa can be any naturally occurring amino acid
  misc_feature (15)..(15): Xaa can be any naturally occurring amino acid
CCEYXCCNPXACXTXGCY

SEQ ID NO: 2532 - protein, 18 aa, Artificial Sequence
  Synthetically generated peptide
  VARIANT (5)..(10): Xaa = Any Amino Acid
  misc_feature (13)..(13): Xaa can be any naturally occurring amino acid
  misc_feature (16)..(16): Xaa can be any naturally occurring amino acid
CCEYXCCNPXACXTGXCY

SEQ ID NO: 2533 - protein, 18 aa, Artificial Sequence
  Synthetically generated peptide
  VARIANT (5)..(10): Xaa = Any Amino Acid
  misc_feature (13)..(13): Xaa can be any naturally occurring amino acid
  misc_feature (17)..(17): Xaa can be any naturally occurring amino acid
CCEYXCCNPXACXTGCXY

SEQ ID NO: 2534 - protein, 17 aa, Artificial Sequence
  Synthetically generated peptide
  VARIANT (5)..(10): Xaa = Any Amino Acid
  misc_feature (14)..(14): Xaa can be any naturally occurring amino acid
CCEYXCCNPXACTXGCY

SEQ ID NO: 2535 - protein, 18 aa, Artificial Sequence
  Synthetically generated peptide
  VARIANT (5)..(10): Xaa = Any Amino Acid
  misc_feature (14)..(15): Xaa can be any naturally occurring amino acid
CCEYXCCNPXACTXXGCY

SEQ ID NO: 2536 - protein, 18 aa, Artificial Sequence
  Synthetically generated peptide
  VARIANT (5)..(10): Xaa = Any Amino Acid
  misc_feature (14)..(14): Xaa can be any naturally occurring amino acid
  misc_feature (16)..(16): Xaa can be any naturally occurring amino acid
CCEYXCCNPXACTXGXCY

SEQ ID NO: 2537 - protein, 18 aa, Artificial Sequence
  Synthetically generated peptide
  VARIANT (5)..(10): Xaa = Any Amino Acid
  misc_feature (14)..(14): Xaa can be any naturally occurring amino acid
  misc_feature (17)..(17): Xaa can be any naturally occurring amino acid
CCEYXCCNPXACTXGCXY

SEQ ID NO: 2538 - protein, 17 aa, Artificial Sequence
  Synthetically generated peptide
  VARIANT (5)..(10): Xaa = Any Amino Acid
  misc_feature (15)..(15): Xaa can be any naturally occurring amino acid
CCEYXCCNPXACTGXCY

SEQ ID NO: 2539 - protein, 18 aa, Artificial Sequence
  Synthetically generated peptide
  VARIANT (5)..(10): Xaa = Any Amino Acid
  misc_feature (15)..(16): Xaa can be any naturally occurring amino acid
CCEYXCCNPXACTGXXCY

SEQ ID NO: 2540 - protein, 18 aa, Artificial Sequence
  Synthetically generated peptide
  VARIANT (5)..(10): Xaa = Any Amino Acid
  misc_feature (15)..(15): Xaa can be any naturally occurring amino acid
  misc_feature (17)..(17): Xaa can be any naturally occurring amino acid
CCEYXCCNPXACTGXCXY

SEQ ID NO: 2541 - protein, 17 aa, Artificial Sequence
  Synthetically generated peptide
  VARIANT (5)..(10): Xaa = Any Amino Acid
  misc_feature (16)..(16): Xaa can be any naturally occurring amino acid
CCEYXCCNPXACTGCXY

SEQ ID NO: 2542 - protein, 18 aa, Artificial Sequence
  Synthetically generated peptide
  VARIANT (5)..(10): Xaa = Any Amino Acid
  misc_feature (16)..(17): Xaa can be any naturally occurring amino acid
CCEYXCCNPXACTGCXXY

SEQ ID NO: 2543 - protein, 16 aa, Artificial Sequence
  Synthetically generated peptide
  VARIANT (5)..(11): Xaa = Any Amino Acid
CCEYXCCNPAXCTGCY

SEQ ID NO: 2544 - protein, 17 aa, Artificial Sequence
  Synthetically generated peptide
  VARIANT (5)..(11): Xaa = Any Amino Acid
  misc_feature (12)..(12): Xaa can be any naturally occurring amino acid
CCEYXCCNPAXXCTGCY

SEQ ID NO: 2545 - protein, 18 aa, Artificial Sequence
  Synthetically generated peptide
  VARIANT (5)..(11): Xaa = Any Amino Acid
  misc_feature (12)..(13): Xaa can be any naturally occurring amino acid
CCEYXCCNPAXXXCTGCY

SEQ ID NO: 2546 - protein, 18 aa, Artificial Sequence
  Synthetically generated peptide
  VARIANT (5)..(11): Xaa = Any Amino Acid
  misc_feature (12)..(12): Xaa can be any naturally occurring amino acid
  misc_feature (14)..(14): Xaa can be any naturally occurring amino acid
CCEYXCCNPAXXCXTGCY

SEQ ID NO: 2547 - protein, 18 aa, Artificial Sequence
  Synthetically generated peptide
  VARIANT (5)..(11): Xaa = Any Amino Acid
  misc_feature (12)..(12): Xaa can be any naturally occurring amino acid
  misc_feature (15)..(15): Xaa can be any naturally occurring amino acid
CCEYXCCNPAXXCTXGCY

SEQ ID NO: 2548 - protein, 18 aa, Artificial Sequence
  Synthetically generated peptide
  VARIANT (5)..(11): Xaa = Any Amino Acid
  misc_feature (12)..(12): Xaa can be any naturally occurring amino acid
  misc_feature (16)..(16): Xaa can be any naturally occurring amino acid
CCEYXCCNPAXXCTGXCY

SEQ ID NO: 2549 - protein, 18 aa, Artificial Sequence
  Synthetically generated peptide
  VARIANT (5)..(11): Xaa = Any Amino Acid
  misc_feature (12)..(12): Xaa can be any naturally occurring amino acid
  misc_feature (17)..(17): Xaa can be any naturally occurring amino acid
CCEYXCCNPAXXCTGCXY

SEQ ID NO: 2550 - protein, 17 aa, Artificial Sequence
  Synthetically generated peptide
  VARIANT (5)..(11): Xaa = Any Amino Acid
  misc_feature (13)..(13): Xaa can be any naturally occurring amino acid
CCEYXCCNPAXCXTGCY

SEQ ID NO: 2551 - protein, 18 aa, Artificial Sequence
  Synthetically generated peptide
  VARIANT (5)..(11): Xaa = Any Amino Acid
  misc_feature (13)..(14): Xaa can be any naturally occurring amino acid
CCEYXCCNPAXCXXTGCY

SEQ ID NO: 2552 - protein, 18 aa, Artificial Sequence
  Synthetically generated peptide
  VARIANT (5)..(11): Xaa = Any Amino Acid
  misc_feature (13)..(13): Xaa can be any naturally occurring amino acid
  misc_feature (15)..(15): Xaa can be any naturally occurring amino acid
CCEYXCCNPAXCXTXGCY

SEQ ID NO: 2553 - protein, 18 aa, Artificial Sequence
  Synthetically generated peptide
  VARIANT (5)..(11): Xaa = Any Amino Acid
  misc_feature (13)..(13): Xaa can be any naturally occurring amino acid
  misc_feature (16)..(16): Xaa can be any naturally occurring amino acid
CCEYXCCNPAXCXTGXCY

SEQ ID NO: 2554 - protein, 18 aa, Artificial Sequence
  Synthetically generated peptide
  VARIANT (5)..(11): Xaa = Any Amino Acid
  misc_feature (13)..(13): Xaa can be any naturally occurring amino acid
  misc_feature (17)..(17): Xaa can be any naturally occurring amino acid
CCEYXCCNPAXCXTGCXY

SEQ ID NO: 2555 - protein, 17 aa, Artificial Sequence
  Synthetically generated peptide
  VARIANT (5)..(11): Xaa = Any Amino Acid
  misc_feature (14)..(14): Xaa can be any naturally occurring amino acid
CCEYXCCNPAXCTXGCY

SEQ ID NO: 2556 - protein, 18 aa, Artificial Sequence
  Synthetically generated peptide
  VARIANT (5)..(11): Xaa = Any Amino Acid
  misc_feature (14)..(15): Xaa can be any naturally occurring amino acid
CCEYXCCNPAXCTXXGCY

SEQ ID NO: 2557 - protein, 18 aa, Artificial Sequence
  Synthetically generated peptide
  VARIANT (5)..(11): Xaa = Any Amino Acid
  misc_feature (14)..(14): Xaa can be any naturally occurring amino acid
  misc_feature (16)..(16): Xaa can be any naturally occurring amino acid
CCEYXCCNPAXCTXGXCY

SEQ ID NO: 2558 - protein, 18 aa, Artificial Sequence
  Synthetically generated peptide
  VARIANT (5)..(11): Xaa = Any Amino Acid
  misc_feature (14)..(14): Xaa can be any naturally occurring amino acid
  misc_feature (17)..(17): Xaa can be any naturally occurring amino acid
CCEYXCCNPAXCTXGCXY

SEQ ID NO: 2559 - protein, 17 aa, Artificial Sequence
  Synthetically generated peptide
  VARIANT (5)..(11): Xaa = Any Amino Acid
  misc_feature (15)..(15): Xaa can be any naturally occurring amino acid
CCEYXCCNPAXCTGXCY

SEQ ID NO: 2560 - protein, 18 aa, Artificial Sequence
  Synthetically generated peptide
  VARIANT (5)..(11): Xaa = Any Amino Acid
  misc_feature (15)..(16): Xaa can be any naturally occurring amino acid
CCEYXCCNPAXCTGXXCY

SEQ ID NO: 2561 - protein, 18 aa, Artificial Sequence
  Synthetically generated peptide
  VARIANT (5)..(11): Xaa = Any Amino Acid
  misc_feature (15)..(15): Xaa can be any naturally occurring amino acid
  misc_feature (17)..(17): Xaa can be any naturally occurring amino acid
CCEYXCCNPAXCTGXCXY

SEQ ID NO: 2562 - protein, 17 aa, Artificial Sequence
  Synthetically generated peptide
  VARIANT (5)..(11): Xaa = Any Amino Acid
  misc_feature (16)..(16): Xaa can be any naturally occurring amino acid
CCEYXCCNPAXCTGCXY

SEQ ID NO: 2563 - protein, 18 aa, Artificial Sequence
  Synthetically generated peptide
  VARIANT (5)..(11): Xaa = Any Amino Acid
  misc_feature (16)..(17): Xaa can be any naturally occurring amino acid
CCEYXCCNPAXCTGCXXY

SEQ ID NO: 2564 - protein, 16 aa, Artificial Sequence
  Synthetically generated peptide
  VARIANT (5)..(12): Xaa = Any Amino Acid
CCEYXCCNPACXTGCY

SEQ ID NO: 2565 - protein, 17 aa, Artificial Sequence
  Synthetically generated peptide
  VARIANT (5)..(12): Xaa = Any Amino Acid
  misc_feature (13)..(13): Xaa can be any naturally occurring amino acid
CCEYXCCNPACXXTGCY

SEQ ID NO: 2566 - protein, 18 aa, Artificial Sequence
  Synthetically generated peptide
  VARIANT (5)..(12): Xaa = Any Amino Acid
  misc_feature (13)..(14): Xaa can be any naturally occurring amino acid
CCEYXCCNPACXXXTGCY

SEQ ID NO: 2567 - protein, 18 aa, Artificial Sequence
  Synthetically generated peptide
  VARIANT (5)..(12): Xaa = Any Amino Acid
  misc_feature (13)..(13): Xaa can be any naturally occurring amino acid
  misc_feature (15)..(15): Xaa can be any naturally occurring amino acid
CCEYXCCNPACXXTXGCY

SEQ ID NO: 2568 - protein, 18 aa, Artificial Sequence
  Synthetically generated peptide
  VARIANT (5)..(12): Xaa = Any Amino Acid
  misc_feature (13)..(13): Xaa can be any naturally occurring amino acid
  misc_feature (16)..(16): Xaa can be any naturally occurring amino acid
CCEYXCCNPACXXTGXCY

SEQ ID NO: 2569 - protein, 18 aa, Artificial Sequence
  Synthetically generated peptide
  VARIANT (5)..(12): Xaa = Any Amino Acid
  misc_feature (13)..(13): Xaa can be any naturally occurring amino acid
  misc_feature (17)..(17): Xaa can be any naturally occurring amino acid
CCEYXCCNPACXXTGCXY

SEQ ID NO: 2570 - protein, 17 aa, Artificial Sequence
  Synthetically generated peptide
  VARIANT (5)..(12): Xaa = Any Amino Acid
  misc_feature (14)..(14): Xaa can be any naturally occurring amino acid
CCEYXCCNPACXTXGCY

SEQ ID NO: 2571 - protein, 18 aa, Artificial Sequence
  Synthetically generated peptide
  VARIANT (5)..(12): Xaa = Any Amino Acid
  misc_feature (14)..(15): Xaa can be any naturally occurring amino acid
CCEYXCCNPACXTXXGCY

SEQ ID NO: 2572 - protein, 18 aa, Artificial Sequence
  Synthetically generated peptide
  VARIANT (5)..(12): Xaa = Any Amino Acid
  misc_feature (14)..(14): Xaa can be any naturally occurring amino acid
  misc_feature (16)..(16): Xaa can be any naturally occurring amino acid
CCEYXCCNPACXTXGXCY

SEQ ID NO: 2573 - protein, 18 aa, Artificial Sequence
  Synthetically generated peptide
  VARIANT (5)..(12): Xaa = Any Amino Acid
  misc_feature (14)..(14): Xaa can be any naturally occurring amino acid
  misc_feature (17)..(17): Xaa can be any naturally occurring amino acid
CCEYXCCNPACXTXGCXY

SEQ ID NO: 2574 - protein, 17 aa, Artificial Sequence
  Synthetically generated peptide
  VARIANT (5)..(12): Xaa = Any Amino Acid
  misc_feature (15)..(15): Xaa can be any naturally occurring amino acid
CCEYXCCNPACXTGXCY

SEQ ID NO: 2575 - protein, 18 aa, Artificial Sequence
  Synthetically generated peptide
  VARIANT (5)..(12): Xaa = Any Amino Acid
  misc_feature (15)..(16): Xaa can be any naturally occurring amino acid
CCEYXCCNPACXTGXXCY

SEQ ID NO: 2576 - protein, 18 aa, Artificial Sequence
  Synthetically generated peptide
  VARIANT (5)..(12): Xaa = Any Amino Acid
  misc_feature (15)..(15): Xaa can be any naturally occurring amino acid
  misc_feature (17)..(17): Xaa can be any naturally occurring amino acid
CCEYXCCNPACXTGXCXY

SEQ ID NO: 2577 - protein, 17 aa, Artificial Sequence
  Synthetically generated peptide
  VARIANT (5)..(12): Xaa = Any Amino Acid
  misc_feature (16)..(16): Xaa can be any naturally occurring amino acid
CCEYXCCNPACXTGCXY

SEQ ID NO: 2578 - protein, 18 aa, Artificial Sequence
  Synthetically generated peptide
  VARIANT (5)..(12): Xaa = Any Amino Acid
  misc_feature (16)..(17): Xaa can be any naturally occurring amino acid
CCEYXCCNPACXTGCXXY

SEQ ID NO: 2579 - protein, 16 aa, Artificial Sequence
  Synthetically generated peptide
  VARIANT (5)..(13): Xaa = Any Amino Acid
CCEYXCCNPACTXGCY

SEQ ID NO: 2580 - protein, 17 aa, Artificial Sequence
  Synthetically generated peptide
  VARIANT (5)..(13): Xaa = Any Amino Acid
  misc_feature (14)..(14): Xaa can be any naturally occurring amino acid
CCEYXCCNPACTXXGCY

SEQ ID NO: 2581 - protein, 18 aa, Artificial Sequence
  Synthetically generated peptide
  VARIANT (5)..(13): Xaa = Any Amino Acid
  misc_feature (14)..(15): Xaa can be any naturally occurring amino acid
CCEYXCCNPACTXXXGCY

SEQ ID NO: 2582 - protein, 18 aa, Artificial Sequence
  Synthetically generated peptide
  VARIANT (5)..(13): Xaa = Any Amino Acid
  misc_feature (14)..(14): Xaa can be any naturally occurring amino acid
  misc_feature (16)..(16): Xaa can be any naturally occurring amino acid
CCEYXCCNPACTXXGXCY

SEQ ID NO: 2583 - protein, 18 aa, Artificial Sequence
  Synthetically generated peptide
  VARIANT (5)..(13): Xaa = Any Amino Acid
  misc_feature (14)..(14): Xaa can be any naturally occurring amino acid
  misc_feature (17)..(17): Xaa can be any naturally occurring amino acid
CCEYXCCNPACTXXGCXY

SEQ ID NO: 2584 - protein, 17 aa, Artificial Sequence
  Synthetically generated peptide
  VARIANT (5)..(13): Xaa = Any Amino Acid
  misc_feature (15)..(15): Xaa can be any naturally occurring amino acid
CCEYXCCNPACTXGXCY

SEQ ID NO: 2585 - protein, 18 aa, Artificial Sequence
  Synthetically generated peptide
  VARIANT (5)..(13): Xaa = Any Amino Acid
  misc_feature (15)..(16): Xaa can be any naturally occurring amino acid
CCEYXCCNPACTXGXXCY

SEQ ID NO: 2586 - protein, 18 aa, Artificial Sequence
  Synthetically generated peptide
  VARIANT (5)..(13): Xaa = Any Amino Acid
  misc_feature (15)..(15): Xaa can be any naturally occurring amino acid
  misc_feature (17)..(17): Xaa can be any naturally occurring amino acid
CCEYXCCNPACTXGXCXY

SEQ ID NO: 2587 - protein, 17 aa, Artificial Sequence
  Synthetically generated peptide
  VARIANT (5)..(13): Xaa = Any Amino Acid
  misc_feature (16)..(16): Xaa can be any naturally occurring amino acid
CCEYXCCNPACTXGCXY

SEQ ID NO: 2588 - protein, 18 aa, Artificial Sequence
  Synthetically generated peptide
  VARIANT (5)..(13): Xaa = Any Amino Acid
  misc_feature (16)..(17): Xaa can be any naturally occurring amino acid
CCEYXCCNPACTXGCXXY

SEQ ID NO: 2589 - protein, 16 aa, Artificial Sequence
  Synthetically generated peptide
  VARIANT (5)..(14): Xaa = Any Amino Acid
CCEYXCCNPACTGXCY

SEQ ID NO: 2590 - protein, 17 aa, Artificial Sequence
  Synthetically generated peptide
  VARIANT (5)..(14): Xaa = Any Amino Acid
  misc_feature (15)..(15): Xaa can be any naturally occurring amino acid
CCEYXCCNPACTGXXCY

SEQ ID NO: 2591 - protein, 18 aa, Artificial Sequence
  Synthetically generated peptide
  VARIANT (5)..(14): Xaa = Any Amino Acid
  misc_feature (15)..(16): Xaa can be any naturally occurring amino acid
CCEYXCCNPACTGXXXCY

SEQ ID NO: 2592 - protein, 18 aa, Artificial Sequence
  Synthetically generated peptide
  VARIANT (5)..(14): Xaa = Any Amino Acid
  misc_feature (15)..(15): Xaa can be any naturally occurring amino acid
  misc_feature (17)..(17): Xaa can be any naturally occurring amino acid
CCEYXCCNPACTGXXCXY

SEQ ID NO: 2593 - protein, 17 aa, Artificial Sequence
  Synthetically generated peptide
  VARIANT (5)..(14): Xaa = Any Amino Acid
  misc_feature (16)..(16): Xaa can be any naturally occurring amino acid
CCEYXCCNPACTGXCXY

SEQ ID NO: 2594 - protein, 18 aa, Artificial Sequence
  Synthetically generated peptide
  VARIANT (5)..(14): Xaa = Any Amino Acid
  misc_feature (16)..(17): Xaa can be any naturally occurring amino acid
CCEYXCCNPACTGXCXXY

SEQ ID NO: 2595 - protein, 16 aa, Artificial Sequence
  Synthetically generated peptide
  VARIANT (5)..(15): Xaa = Any Amino Acid
CCEYXCCNPACTGCXY

SEQ ID NO: 2596 - protein, 17 aa, Artificial Sequence
  Synthetically generated peptide
  VARIANT (5)..(15): Xaa = Any Amino Acid
  misc_feature (16)..(16): Xaa can be any naturally occurring amino acid
CCEYXCCNPACTGCXXY

SEQ ID NO: 2597 - protein, 18 aa, Artificial Sequence
  Synthetically generated peptide
  VARIANT (5)..(15): Xaa = Any Amino Acid
  misc_feature (16)..(17): Xaa can be any naturally occurring amino acid
CCEYXCCNPACTGCXXXY

SEQ ID NO: 2598 - protein, 15 aa, Artificial Sequence
  Synthetically generated peptide
  VARIANT (7)..(7): Xaa = Any Amino Acid
CCEYCCXNPACTGCY

SEQ ID NO: 2599 - protein, 16 aa, Artificial Sequence
  Synthetically generated peptide
  VARIANT (7)..(8): Xaa = Any Amino Acid
CCEYCCXXNPACTGCY

SEQ ID NO: 2600 - protein, 17 aa, Artificial Sequence
  Synthetically generated peptide
  VARIANT (7)..(8): Xaa = Any Amino Acid
  misc_feature (9)..(9): Xaa can be any naturally occurring amino acid
CCEYCCXXXNPACTGCY

SEQ ID NO: 2601 - protein, 18 aa, Artificial Sequence
  Synthetically generated peptide
  VARIANT (7)..(8): Xaa = Any Amino Acid
  misc_feature (9)..(10): Xaa can be any naturally occurring amino acid
CCEYCCXXXXNPACTGCY

SEQ ID NO: 2602 - protein, 18 aa, Artificial Sequence
  Synthetically generated peptide
  VARIANT (7)..(8): Xaa = Any Amino Acid
  misc_feature (9)..(9): Xaa can be any naturally occurring amino acid
  misc_feature (11)..(11): Xaa can be any naturally occurring amino acid
CCEYCCXXXNXPACTGCY

SEQ ID NO: 2603 - protein, 18 aa, Artificial Sequence
  Synthetically generated peptide
  VARIANT (7)..(8): Xaa = Any Amino Acid
  misc_feature (9)..(9): Xaa can be any naturally occurring amino acid
  misc_feature (12)..(12): Xaa can be any naturally occurring amino acid
CCEYCCXXXNPXACTGCY

SEQ ID NO: 2604 - protein, 18 aa, Artificial Sequence
  Synthetically generated peptide
  VARIANT (7)..(8): Xaa = Any Amino Acid
  misc_feature (9)..(9): Xaa can be any naturally occurring amino acid
  misc_feature (13)..(13): Xaa can be any naturally occurring amino acid
CCEYCCXXXNPAXCTGCY

SEQ ID NO: 2605 - protein, 18 aa, Artificial Sequence
  Synthetically generated peptide
  VARIANT (7)..(8): Xaa = Any Amino Acid
  misc_feature (9)..(9): Xaa can be any naturally occurring amino acid
  misc_feature (14)..(14): Xaa can be any naturally occurring amino acid
CCEYCCXXXNPACXTGCY

SEQ ID NO: 2606 - protein, 18 aa, Artificial Sequence
  Synthetically generated peptide
  VARIANT (7)..(8): Xaa = Any Amino Acid
  misc_feature (9)..(9): Xaa can be any naturally occurring amino acid
  misc_feature (15)..(15): Xaa can be any naturally occurring amino acid
CCEYCCXXXNPACTXGCY

SEQ ID NO: 2607 - protein, 18 aa, Artificial Sequence
  Synthetically generated peptide
  VARIANT (7)..(8): Xaa = Any Amino Acid
  misc_feature (9)..(9): Xaa can be any naturally occurring amino acid
  misc_feature (16)..(16): Xaa can be any naturally occurring amino acid
CCEYCCXXXNPACTGXCY

SEQ ID NO: 2608 - protein, 18 aa, Artificial Sequence
  Synthetically generated peptide
  VARIANT (7)..(8): Xaa = Any Amino Acid
  misc_feature (9)..(9): Xaa can be any naturally occurring amino acid
  misc_feature (17)..(17): Xaa can be any naturally occurring amino acid
CCEYCCXXXNPACTGCXY

SEQ ID NO: 2609 - protein, 17 aa, Artificial Sequence
  Synthetically generated peptide
  VARIANT (7)..(8): Xaa = Any Amino Acid
  misc_feature (10)..(10): Xaa can be any naturally occurring amino acid
CCEYCCXXNXPACTGCY

SEQ ID NO: 2610 - protein, 18 aa, Artificial Sequence
  Synthetically generated peptide
  VARIANT (7)..(8): Xaa = Any Amino Acid
  misc_feature (10)..(11): Xaa can be any naturally occurring amino acid
CCEYCCXXNXXPACTGCY

SEQ ID NO: 2611 - protein, 18 aa, Artificial Sequence
  Synthetically generated peptide
  VARIANT (7)..(8): Xaa = Any Amino Acid
  misc_feature (10)..(10): Xaa can be any naturally occurring amino acid
  misc_feature (12)..(12): Xaa can be any naturally occurring amino acid
CCEYCCXXNXPXACTGCY

SEQ ID NO: 2612 - protein, 18 aa, Artificial Sequence
  Synthetically generated peptide
  VARIANT (7)..(8): Xaa = Any Amino Acid
  misc_feature (10)..(10): Xaa can be any naturally occurring amino acid
  misc_feature (13)..(13): Xaa can be any naturally occurring amino acid
CCEYCCXXNXPAXCTGCY

SEQ ID NO: 2613 - protein, 18 aa, Artificial Sequence
  Synthetically generated peptide
  VARIANT (7)..(8): Xaa = Any Amino Acid
  misc_feature (10)..(10): Xaa can be any naturally occurring amino acid
  misc_feature (14)..(14): Xaa can be any naturally occurring amino acid
CCEYCCXXNXPACXTGCY

SEQ ID NO: 2614 - protein, 18 aa, Artificial Sequence
  Synthetically generated peptide
  VARIANT (7)..(8): Xaa = Any Amino Acid
  misc_feature (10)..(10): Xaa can be any naturally occurring amino acid
  misc_feature (15)..(15): Xaa can be any naturally occurring amino acid
CCEYCCXXNXPACTXGCY

SEQ ID NO: 2615 - protein, 18 aa, Artificial Sequence
  Synthetically generated peptide
  VARIANT (7)..(8): Xaa = Any Amino Acid
  misc_feature (10)..(10): Xaa can be any naturally occurring amino acid
  misc_feature (16)..(16): Xaa can be any naturally occurring amino acid
CCEYCCXXNXPACTGXCY

SEQ ID NO: 2616 - protein, 18 aa, Artificial Sequence
  Synthetically generated peptide
  VARIANT (7)..(8): Xaa = Any Amino Acid
  misc_feature (10)..(10): Xaa can be any naturally occurring amino acid
  misc_feature (17)..(17): Xaa can be any naturally occurring amino acid
CCEYCCXXNXPACTGCXY

SEQ ID NO: 2617 - protein, 17 aa, Artificial Sequence
  Synthetically generated peptide
  VARIANT (7)..(8): Xaa = Any Amino Acid
  misc_feature (11)..(11): Xaa can be any naturally occurring amino acid
CCEYCCXXNPXACTGCY

SEQ ID NO: 2618 - protein, 18 aa, Artificial Sequence
  Synthetically generated peptide
  VARIANT (7)..(8): Xaa = Any Amino Acid
  misc_feature (11)..(12): Xaa can be any naturally occurring amino acid
CCEYCCXXNPXXACTGCY

SEQ ID NO: 2619 - protein, 18 aa, Artificial Sequence
  Synthetically generated peptide
  VARIANT (7)..(8): Xaa = Any Amino Acid
  misc_feature (11)..(11): Xaa can be any naturally occurring amino acid
  misc_feature (13)..(13): Xaa can be any naturally occurring amino acid
CCEYCCXXNPXAXCTGCY

SEQ ID NO: 2620 - protein, 18 aa, Artificial Sequence
  Synthetically generated peptide
  VARIANT (7)..(8): Xaa = Any Amino Acid
  misc_feature (11)..(11): Xaa can be any naturally occurring amino acid
  misc_feature (14)..(14): Xaa can be any naturally occurring amino acid
CCEYCCXXNPXACXTGCY

SEQ ID NO: 2621 - protein, 18 aa, Artificial Sequence
  Synthetically generated peptide
  VARIANT (7)..(8): Xaa = Any Amino Acid
  misc_feature (11)..(11): Xaa can be any naturally occurring amino acid
  misc_feature (15)..(15): Xaa can be any naturally occurring amino acid
CCEYCCXXNPXACTXGCY

SEQ ID NO: 2622 - protein, 18 aa, Artificial Sequence
  Synthetically generated peptide
  VARIANT (7)..(8): Xaa = Any Amino Acid
  misc_feature (11)..(11): Xaa can be any naturally occurring amino acid
  misc_feature (16)..(16): Xaa can be any naturally occurring amino acid
CCEYCCXXNPXACTGXCY

SEQ ID NO: 2623 - protein, 18 aa, Artificial Sequence
  Synthetically generated peptide
  VARIANT (7)..(8): Xaa = Any Amino Acid
  misc_feature (11)..(11): Xaa can be any naturally occurring amino acid
  misc_feature (17)..(17): Xaa can be any naturally occurring amino acid
CCEYCCXXNPXACTGCXY

SEQ ID NO: 2624 - protein, 17 aa, Artificial Sequence
  Synthetically generated peptide
  VARIANT (7)..(8): Xaa = Any Amino Acid
  misc_feature (12)..(12): Xaa can be any naturally occurring amino acid
CCEYCCXXNPAXCTGCY

SEQ ID NO: 2625 - protein, 18 aa, Artificial Sequence
  Synthetically generated peptide
  VARIANT (7)..(8): Xaa = Any Amino Acid
  misc_feature (12)..(13): Xaa can be any naturally occurring amino acid
CCEYCCXXNPAXXCTGCY

SEQ ID NO: 2626 - protein, 18 aa, Artificial Sequence
  Synthetically generated peptide
  VARIANT (7)..(8): Xaa = Any Amino Acid
  misc_feature (12)..(12): Xaa can be any naturally occurring amino acid
  misc_feature (14)..(14): Xaa can be any naturally occurring amino acid
CCEYCCXXNPAXCXTGCY

SEQ ID NO: 2627 - protein, 18 aa, Artificial Sequence
  Synthetically generated peptide
  VARIANT (7)..(8): Xaa = Any Amino Acid
  misc_feature (12)..(12): Xaa can be any naturally occurring amino acid
  misc_feature (15)..(15): Xaa can be any naturally occurring amino acid
CCEYCCXXNPAXCTXGCY

SEQ ID NO: 2628 - protein, 18 aa, Artificial Sequence
  Synthetically generated peptide
  VARIANT (7)..(8): Xaa = Any Amino Acid
  misc_feature (12)..(12): Xaa can be any naturally occurring amino acid
  misc_feature (16)..(16): Xaa can be any naturally occurring amino acid
CCEYCCXXNPAXCTGXCY

SEQ ID NO: 2629 - protein, 18 aa, Artificial Sequence
  Synthetically generated peptide
  VARIANT (7)..(8): Xaa = Any Amino Acid
  misc_feature (12)..(12): Xaa can be any naturally occurring amino acid
  misc_feature (17)..(17): Xaa can be any naturally occurring amino acid
CCEYCCXXNPAXCTGCXY

SEQ ID NO: 2630 - protein, 17 aa, Artificial Sequence
  Synthetically generated peptide
  VARIANT (7)..(8): Xaa = Any Amino Acid
  misc_feature (13)..(13): Xaa can be any naturally occurring amino acid
CCEYCCXXNPACXTGCY

SEQ ID NO: 2631 - protein, 18 aa, Artificial Sequence
  Synthetically generated peptide
  VARIANT (7)..(8): Xaa = Any Amino Acid
  misc_feature (13)..(14): Xaa can be any naturally occurring amino acid
CCEYCCXXNPACXXTGCY

SEQ ID NO: 2632 - protein, 18 aa, Artificial Sequence
  Synthetically generated peptide
  VARIANT (7)..(8): Xaa = Any Amino Acid
  misc_feature (13)..(13): Xaa can be any naturally occurring amino acid
  misc_feature (15)..(15): Xaa can be any naturally occurring amino acid
CCEYCCXXNPACXTXGCY

SEQ ID NO: 2633 - protein, 18 aa, Artificial Sequence
  Synthetically generated peptide
  VARIANT (7)..(8): Xaa = Any Amino Acid
  misc_feature (13)..(13): Xaa can be any naturally occurring amino acid
  misc_feature (16)..(16): Xaa can be any naturally occurring amino acid
CCEYCCXXNPACXTGXCY

SEQ ID NO: 2634 - protein, 18 aa, Artificial Sequence
  Synthetically generated peptide
  VARIANT (7)..(8): Xaa = Any Amino Acid
  misc_feature (13)..(13): Xaa can be any naturally occurring amino acid
  misc_feature (17)..(17): Xaa can be any naturally occurring amino acid
CCEYCCXXNPACXTGCXY

SEQ ID NO: 2635 - protein, 17 aa, Artificial Sequence
  Synthetically generated peptide
  VARIANT (7)..(8): Xaa = Any Amino Acid
  misc_feature (14)..(14): Xaa can be any naturally occurring amino acid
CCEYCCXXNPACTXGCY

SEQ ID NO: 2636 - protein, 18 aa, Artificial Sequence
  Synthetically generated peptide
  VARIANT (7)..(8): Xaa = Any Amino Acid
  misc_feature (14)..(15): Xaa can be any naturally occurring amino acid
CCEYCCXXNPACTXXGCY

SEQ ID NO: 2637 - protein, 18 aa, Artificial Sequence
  Synthetically generated peptide
  VARIANT (7)..(8): Xaa = Any Amino Acid
  misc_feature (14)..(14): Xaa can be any naturally occurring amino acid
  misc_feature (16)..(16): Xaa can be any naturally occurring amino acid
CCEYCCXXNPACTXGXCY

SEQ ID NO: 2638 - protein, 18 aa, Artificial Sequence
  Synthetically generated peptide
  VARIANT (7)..(8): Xaa = Any Amino Acid
  misc_feature (14)..(14): Xaa can be any naturally occurring amino acid
  misc_feature (17)..(17): Xaa can be any naturally occurring amino acid
CCEYCCXXNPACTXGCXY

SEQ ID NO: 2639 - protein, 17 aa, Artificial Sequence
  Synthetically generated peptide
  VARIANT (7)..(8): Xaa = Any Amino Acid
  misc_feature (15)..(15): Xaa can be any naturally occurring amino acid
CCEYCCXXNPACTGXCY

SEQ ID NO: 2640 - protein, 18 aa, Artificial Sequence
  Synthetically generated peptide
  VARIANT (7)..(8): Xaa = Any Amino Acid
  misc_feature (15)..(16): Xaa can be any naturally occurring amino acid
CCEYCCXXNPACTGXXCY

SEQ ID NO: 2641 - protein, 18 aa, Artificial Sequence
  Synthetically generated peptide
  VARIANT (7)..(8): Xaa = Any Amino Acid
  misc_feature (15)..(15): Xaa can be any naturally occurring amino acid
  misc_feature (17)..(17): Xaa can be any naturally occurring amino acid
CCEYCCXXNPACTGXCXY

SEQ ID NO: 2642 - protein, 17 aa, Artificial Sequence
  Synthetically generated peptide
  VARIANT (7)..(8): Xaa = Any Amino Acid
  misc_feature (16)..(16): Xaa can be any naturally occurring amino acid
CCEYCCXXNPACTGCXY

SEQ ID NO: 2643 - protein, 18 aa, Artificial Sequence
  Synthetically generated peptide
  VARIANT (7)..(8): Xaa = Any Amino Acid
  misc_feature (16)..(17): Xaa can be any naturally occurring amino acid
CCEYCCXXNPACTGCXXY

SEQ ID NO: 2644 - protein, 16 aa, Artificial Sequence
  Synthetically generated peptide
  VARIANT (7)..(9): Xaa = Any Amino Acid
CCEYCCXNXPACTGCY

SEQ ID NO: 2645 - protein, 17 aa, Artificial Sequence
  Synthetically generated peptide
  VARIANT (7)..(9): Xaa = Any Amino Acid
  misc_feature (10)..(10): Xaa can be any naturally occurring amino acid
CCEYCCXNXXPACTGCY

SEQ ID NO: 2646 - protein, 18 aa, Artificial Sequence
  Synthetically generated peptide
  VARIANT (7)..(9): Xaa = Any Amino Acid
  misc_feature (10)..(11): Xaa can be any naturally occurring amino acid
CCEYCCXNXXXPACTGCY

SEQ ID NO: 2647 - protein, 18 aa, Artificial Sequence
  Synthetically generated peptide
  VARIANT (7)..(9): Xaa = Any Amino Acid
  misc_feature (10)..(10): Xaa can be any naturally occurring amino acid
  misc_feature (12)..(12): Xaa can be any naturally occurring amino acid
CCEYCCXNXXPXACTGCY

SEQ ID NO: 2648 - protein, 18 aa, Artificial Sequence
  Synthetically generated peptide
  VARIANT (7)..(9): Xaa = Any Amino Acid
  misc_feature (10)..(10): Xaa can be any naturally occurring amino acid
  misc_feature (13)..(13): Xaa can be any naturally occurring amino acid
CCEYCCXNXXPAXCTGCY

SEQ ID NO: 2649 - protein, 18 aa, Artificial Sequence
  Synthetically generated peptide
  VARIANT (7)..(9): Xaa = Any Amino Acid
  misc_feature (10)..(10): Xaa can be any naturally occurring amino acid
  misc_feature (14)..(14): Xaa can be any naturally occurring amino acid
CCEYCCXNXXPACXTGCY

SEQ ID NO: 2650 - protein, 18 aa, Artificial Sequence
  Synthetically generated peptide
  VARIANT (7)..(9): Xaa = Any Amino Acid
  misc_feature (10)..(10): Xaa can be any naturally occurring amino acid
  misc_feature (15)..(15): Xaa can be any naturally occurring amino acid
CCEYCCXNXXPACTXGCY

SEQ ID NO: 2651 - protein, 18 aa, Artificial Sequence
  Synthetically generated peptide
  VARIANT (7)..(9): Xaa = Any Amino Acid
  misc_feature (10)..(10): Xaa can be any naturally occurring amino acid
  misc_feature (16)..(16): Xaa can be any naturally occurring amino acid
CCEYCCXNXXPACTGXCY

SEQ ID NO: 2652 - protein, 18 aa, Artificial Sequence
  Synthetically generated peptide
  VARIANT (7)..(9): Xaa = Any Amino Acid
  misc_feature (10)..(10): Xaa can be any naturally occurring amino acid
  misc_feature (17)..(17): Xaa can be any naturally occurring amino acid
CCEYCCXNXXPACTGCXY

SEQ ID NO: 2653 - protein, 17 aa, Artificial Sequence
  Synthetically generated peptide
  VARIANT (7)..(9): Xaa = Any Amino Acid
  misc_feature (11)..(11): Xaa can be any naturally occurring amino acid
CCEYCCXNXPXACTGCY

SEQ ID NO: 2654 - protein, 18 aa, Artificial Sequence
  Synthetically generated peptide
  VARIANT (7)..(9): Xaa = Any Amino Acid
  misc_feature (11)..(12): Xaa can be any naturally occurring amino acid
CCEYCCXNXPXXACTGCY

SEQ ID NO: 2655 - protein, 18 aa, Artificial Sequence
  Synthetically generated peptide
  VARIANT (7)..(9): Xaa = Any Amino Acid
  misc_feature (11)..(11): Xaa can be any naturally occurring amino acid
  misc_feature (13)..(13): Xaa can be any naturally occurring amino acid
CCEYCCXNXPXAXCTGCY

SEQ ID NO: 2656 - protein, 18 aa, Artificial Sequence
  Synthetically generated peptide
  VARIANT (7)..(9): Xaa = Any Amino Acid
  misc_feature (11)..(11): Xaa can be any naturally occurring amino acid
  misc_feature (14)..(14): Xaa can be any naturally occurring amino acid
CCEYCCXNXPXACXTGCY

SEQ ID NO: 2657 - protein, 18 aa, Artificial Sequence
  Synthetically generated peptide
  VARIANT (7)..(9): Xaa = Any Amino Acid
  misc_feature (11)..(11): Xaa can be any naturally occurring amino acid
  misc_feature (15)..(15): Xaa can be any naturally occurring amino acid
CCEYCCXNXPXACTXGCY

SEQ ID NO: 2658 - protein, 18 aa, Artificial Sequence
  Synthetically generated peptide
  VARIANT (7)..(9): Xaa = Any Amino Acid
  misc_feature (11)..(11): Xaa can be any naturally occurring amino acid
  misc_feature (16)..(16): Xaa can be any naturally occurring amino acid
CCEYCCXNXPXACTGXCY

SEQ ID NO: 2659 - protein, 18 aa, Artificial Sequence
  Synthetically generated peptide
  VARIANT (7)..(9): Xaa = Any Amino Acid
  misc_feature (11)..(11): Xaa can be any naturally occurring amino acid
  misc_feature (17)..(17): Xaa can be any naturally occurring amino acid
CCEYCCXNXPXACTGCXY

SEQ ID NO: 2660 - protein, 17 aa, Artificial Sequence
  Synthetically generated peptide
  VARIANT (7)..(9): Xaa = Any Amino Acid
  misc_feature (12)..(12): Xaa can be any naturally occurring amino acid
CCEYCCXNXPAXCTGCY

SEQ ID NO: 2661 - protein, 18 aa, Artificial Sequence
  Synthetically generated peptide
  VARIANT (7)..(9): Xaa = Any Amino Acid
  misc_feature (12)..(13): Xaa can be any naturally occurring amino acid
CCEYCCXNXPAXXCTGCY

SEQ ID NO: 2662 - protein, 18 aa, Artificial Sequence
  Synthetically generated peptide
  VARIANT (7)..(9): Xaa = Any Amino Acid
  misc_feature (12)..(12): Xaa can be any naturally occurring amino acid
  misc_feature (14)..(14): Xaa can be any naturally occurring amino acid
CCEYCCXNXPAXCXTGCY

SEQ ID NO: 2663 - protein, 18 aa, Artificial Sequence
  Synthetically generated peptide
  VARIANT (7)..(9): Xaa = Any Amino Acid
  misc_feature (12)..(12): Xaa can be any naturally occurring amino acid
  misc_feature (15)..(15): Xaa can be any naturally occurring amino acid
CCEYCCXNXPAXCTXGCY

SEQ ID NO: 2664 - protein, 18 aa, Artificial Sequence
  Synthetically generated peptide
  VARIANT (7)..(9): Xaa = Any Amino Acid
  misc_feature (12)..(12): Xaa can be any naturally occurring amino acid
  misc_feature (16)..(16): Xaa can be any naturally occurring amino acid
CCEYCCXNXPAXCTGXCY

SEQ ID NO: 2665 - protein, 18 aa, Artificial Sequence
  Synthetically generated peptide
  VARIANT (7)..(9): Xaa = Any Amino Acid
  misc_feature (12)..(12): Xaa can be any naturally occurring amino acid
  misc_feature (17)..(17): Xaa can be any naturally occurring amino acid
CCEYCCXNXPAXCTGCXY

SEQ ID NO: 2666 - protein, 17 aa, Artificial Sequence
  Synthetically generated peptide
  VARIANT (7)..(9): Xaa = Any Amino Acid
  misc_feature (13)..(13): Xaa can be any naturally occurring amino acid
CCEYCCXNXPACXTGCY

SEQ ID NO: 2667 - protein, 18 aa, Artificial Sequence
  Synthetically generated peptide
  VARIANT (7)..(9): Xaa = Any Amino Acid
  misc_feature (13)..(14): Xaa can be any naturally occurring amino acid
CCEYCCXNXPACXXTGCY

SEQ ID NO: 2668 - protein, 18 aa, Artificial Sequence
  Synthetically generated peptide
  VARIANT (7)..(9): Xaa = Any Amino Acid
  misc_feature (13)..(13): Xaa can be any naturally occurring amino acid
  misc_feature (15)..(15): Xaa can be any naturally occurring amino acid
CCEYCCXNXPACXTXGCY

SEQ ID NO: 2669 - protein, 18 aa, Artificial Sequence
  Synthetically generated peptide
  VARIANT (7)..(9): Xaa = Any Amino Acid
  misc_feature (13)..(13): Xaa can be any naturally occurring amino acid
  misc_feature (16)..(16): Xaa can be any naturally occurring amino acid
CCEYCCXNXPACXTGXCY

SEQ ID NO: 2670 - protein, 18 aa, Artificial Sequence
  Synthetically generated peptide
  VARIANT (7)..(9): Xaa = Any Amino Acid
  misc_feature (13)..(13): Xaa can be any naturally occurring amino acid
  misc_feature (17)..(17): Xaa can be any naturally occurring amino acid
CCEYCCXNXPACXTGCXY

SEQ ID NO: 2671 - protein, 17 aa, Artificial Sequence
  Synthetically generated peptide
  VARIANT (7)..(9): Xaa = Any Amino Acid
  misc_feature (14)..(14): Xaa can be any naturally occurring amino acid
CCEYCCXNXPACTXGCY

SEQ ID NO: 2672 - protein, 18 aa, Artificial Sequence
  Synthetically generated peptide
  VARIANT (7)..(9): Xaa = Any Amino Acid
  misc_feature (14)..(15): Xaa can be any naturally occurring amino acid
CCEYCCXNXPACTXXGCY

SEQ ID NO: 2673 - protein, 18 aa, Artificial Sequence
  Synthetically generated peptide
  VARIANT (7)..(9): Xaa = Any Amino Acid
  misc_feature (14)..(14): Xaa can be any naturally occurring amino acid
  misc_feature (16)..(16): Xaa can be any naturally occurring amino acid
CCEYCCXNXPACTXGXCY

SEQ ID NO: 2674 - protein, 18 aa, Artificial Sequence
  Synthetically generated peptide
  VARIANT (7)..(9): Xaa = Any Amino Acid
  misc_feature (14)..(14): Xaa can be any naturally occurring amino acid
  misc_feature (17)..(17): Xaa can be any naturally occurring amino acid
CCEYCCXNXPACTXGCXY

SEQ ID NO: 2675 - protein, 17 aa, Artificial Sequence
  Synthetically generated peptide
  VARIANT (7)..(9): Xaa = Any Amino Acid
  misc_feature (15)..(15): Xaa can be any naturally occurring amino acid
CCEYCCXNXPACTGXCY

SEQ ID NO: 2676 - protein, 18 aa, Artificial Sequence
  Synthetically generated peptide
  VARIANT (7)..(9): Xaa = Any Amino Acid
  misc_feature (15)..(16): Xaa can be any naturally occurring amino acid
CCEYCCXNXPACTGXXCY

SEQ ID NO: 2677 - protein, 18 aa, Artificial Sequence
  Synthetically generated peptide
  VARIANT (7)..(9): Xaa = Any Amino Acid
  misc_feature (15)..(15): Xaa can be any naturally occurring amino acid
  misc_feature (17)..(17): Xaa can be any naturally occurring amino acid
CCEYCCXNXPACTGXCXY

SEQ ID NO: 2678 - protein, 17 aa, Artificial Sequence
  Synthetically generated peptide
  VARIANT (7)..(9): Xaa = Any Amino Acid
  misc_feature (16)..(16): Xaa can be any naturally occurring amino acid
CCEYCCXNXPACTGCXY

SEQ ID NO: 2679 - protein, 18 aa, Artificial Sequence
  Synthetically generated peptide
  VARIANT (7)..(9): Xaa = Any Amino Acid
  misc_feature (16)..(17): Xaa can be any naturally occurring amino acid
CCEYCCXNXPACTGCXXY

SEQ ID NO: 2680 - protein, 16 aa, Artificial Sequence
  Synthetically generated peptide
  VARIANT (7)..(10): Xaa = Any Amino Acid
CCEYCCXNPXACTGCY

SEQ ID NO: 2681 - protein, 17 aa, Artificial Sequence
  Synthetically generated peptide
  VARIANT (7)..(10): Xaa = Any Amino Acid
  misc_feature (11)..(11): Xaa can be any naturally occurring amino acid
CCEYCCXNPXXACTGCY

SEQ ID NO: 2682 - protein, 18 aa, Artificial Sequence
  Synthetically generated peptide
  VARIANT (7)..(10): Xaa = Any Amino Acid
  misc_feature (11)..(12): Xaa can be any naturally occurring amino acid
CCEYCCXNPXXXACTGCY

SEQ ID NO: 2683 - protein, 18 aa, Artificial Sequence
  Synthetically generated peptide
  VARIANT (7)..(10): Xaa = Any Amino Acid
  misc_feature (11)..(11): Xaa can be any naturally occurring amino acid
  misc_feature (13)..(13): Xaa can be any naturally occurring amino acid
CCEYCCXNPXXAXCTGCY

SEQ ID NO: 2684 - protein, 18 aa, Artificial Sequence
  Synthetically generated peptide
  VARIANT (7)..(10): Xaa = Any Amino Acid
  misc_feature (11)..(11): Xaa can be any naturally occurring amino acid
  misc_feature (14)..(14): Xaa can be any naturally occurring amino acid
CCEYCCXNPXXACXTGCY

SEQ ID NO: 2685 - protein, 18 aa, Artificial Sequence
  Synthetically generated peptide
  VARIANT (7)..(10): Xaa = Any Amino Acid
  misc_feature (11)..(11): Xaa can be any naturally occurring amino acid
  misc_feature (15)..(15): Xaa can be any naturally occurring amino acid
CCEYCCXNPXXACTXGCY

SEQ ID NO: 2686 - protein, 18 aa, Artificial Sequence
  Synthetically generated peptide
  VARIANT (7)..(10): Xaa = Any Amino Acid
  misc_feature (11)..(11): Xaa can be any naturally occurring amino acid
  misc_feature (16)..(16): Xaa can be any naturally occurring amino acid
CCEYCCXNPXXACTGXCY

SEQ ID NO: 2687 - protein, 18 aa, Artificial Sequence
  Synthetically generated peptide
  VARIANT (7)..(10): Xaa = Any Amino Acid
  misc_feature (11)..(11): Xaa can be any naturally occurring amino acid
  misc_feature (17)..(17): Xaa can be any naturally occurring amino acid
CCEYCCXNPXXACTGCXY

SEQ ID NO: 2688 - protein, 17 aa, Artificial Sequence
  Synthetically generated peptide
  VARIANT (7)..(10): Xaa = Any Amino Acid
  misc_feature (12)..(12): Xaa can be any naturally occurring amino acid
CCEYCCXNPXAXCTGCY

SEQ ID NO: 2689 - protein, 18 aa, Artificial Sequence
  Synthetically generated peptide
  VARIANT (7)..(10): Xaa = Any Amino Acid
  misc_feature (12)..(13): Xaa can be any naturally occurring amino acid
CCEYCCXNPXAXXCTGCY

SEQ ID NO: 2690 - protein, 18 aa, Artificial Sequence
  Synthetically generated peptide
  VARIANT (7)..(10): Xaa = Any Amino Acid
  misc_feature (12)..(12): Xaa can be any naturally occurring amino acid
  misc_feature (14)..(14): Xaa can be any naturally occurring amino acid
CCEYCCXNPXAXCXTGCY

SEQ ID NO: 2691 - protein, 18 aa, Artificial Sequence
  Synthetically generated peptide
  VARIANT (7)..(10): Xaa = Any Amino Acid
  misc_feature (12)..(12): Xaa can be any naturally occurring amino acid
  misc_feature (15)..(15): Xaa can be any naturally occurring amino acid
CCEYCCXNPXAXCTXGCY

SEQ ID NO: 2692 - protein, 18 aa, Artificial Sequence
  Synthetically generated peptide
  VARIANT (7)..(10): Xaa = Any Amino Acid
  misc_feature (12)..(12): Xaa can be any naturally occurring amino acid
  misc_feature (16)..(16): Xaa can be any naturally occurring amino acid
CCEYCCXNPXAXCTGXCY

SEQ ID NO: 2693 - protein, 18 aa, Artificial Sequence
  Synthetically generated peptide
  VARIANT (7)..(10): Xaa = Any Amino Acid
  misc_feature (12)..(12): Xaa can be any naturally occurring amino acid
  misc_feature (17)..(17): Xaa can be any naturally occurring amino acid
CCEYCCXNPXAXCTGCXY

SEQ ID NO: 2694 - protein, 17 aa, Artificial Sequence
  Synthetically generated peptide
  VARIANT (7)..(10): Xaa = Any Amino Acid
  misc_feature (13)..(13): Xaa can be any naturally occurring amino acid
CCEYCCXNPXACXTGCY

SEQ ID NO: 2695 - protein, 18 aa, Artificial Sequence
  Synthetically generated peptide
  VARIANT (7)..(10): Xaa = Any Amino Acid
  misc_feature (13)..(14): Xaa can be any naturally occurring amino acid
CCEYCCXNPXACXXTGCY

SEQ ID NO: 2696 - protein, 18 aa, Artificial Sequence
  Synthetically generated peptide
  VARIANT (7)..(10): Xaa = Any Amino Acid
  misc_feature (13)..(13): Xaa can be any naturally occurring amino acid
  misc_feature (15)..(15): Xaa can be any naturally occurring amino acid
CCEYCCXNPXACXTXGCY

SEQ ID NO: 2697 - protein, 18 aa, Artificial Sequence
  Synthetically generated peptide
  VARIANT (7)..(10): Xaa = Any Amino Acid
  misc_feature (13)..(13): Xaa can be any naturally occurring amino acid
  misc_feature (16)..(16): Xaa can be any naturally occurring amino acid
CCEYCCXNPXACXTGXCY

SEQ ID NO: 2698 - protein, 18 aa, Artificial Sequence
  Synthetically generated peptide
  VARIANT (7)..(10): Xaa = Any Amino Acid
  misc_feature (13)..(13): Xaa can be any naturally occurring amino acid
  misc_feature (17)..(17): Xaa can be any naturally occurring amino acid
CCEYCCXNPXACXTGCXY

SEQ ID NO: 2699 - protein, 17 aa, Artificial Sequence
  Synthetically generated peptide
  VARIANT (7)..(10): Xaa = Any Amino Acid
  misc_feature (14)..(14): Xaa can be any naturally occurring amino acid
CCEYCCXNPXACTXGCY

SEQ ID NO: 2700 - protein, 18 aa, Artificial Sequence
  Synthetically generated peptide
  VARIANT (7)..(10): Xaa = Any Amino Acid
  misc_feature (14)..(15): Xaa can be any naturally occurring amino acid
CCEYCCXNPXACTXXGCY

SEQ ID NO: 2701 - protein, 18 aa, Artificial Sequence
  Synthetically generated peptide
  VARIANT (7)..(10): Xaa = Any Amino Acid
  misc_feature (14)..(14): Xaa can be any naturally occurring amino acid
  misc_feature (16)..(16): Xaa can be any naturally occurring amino acid
CCEYCCXNPXACTXGXCY

SEQ ID NO: 2702 - protein, 18 aa, Artificial Sequence
  Synthetically generated peptide
  VARIANT (7)..(10): Xaa = Any Amino Acid
  misc_feature (14)..(14): Xaa can be any naturally occurring amino acid
  misc_feature (17)..(17): Xaa can be any naturally occurring amino acid
CCEYCCXNPXACTXGCXY

SEQ ID NO: 2703 - protein, 17 aa, Artificial Sequence
  Synthetically generated peptide
  VARIANT (7)..(10): Xaa = Any Amino Acid
  misc_feature (15)..(15): Xaa can be any naturally occurring amino acid
CCEYCCXNPXACTGXCY

SEQ ID NO: 2704 - protein, 18 aa, Artificial Sequence
  Synthetically generated peptide
  VARIANT (7)..(10): Xaa = Any Amino Acid
  misc_feature (15)..(16): Xaa can be any naturally occurring amino acid
CCEYCCXNPXACTGXXCY

SEQ ID NO: 2705 - protein, 18 aa, Artificial Sequence
  Synthetically generated peptide
  VARIANT (7)..(10): Xaa = Any Amino Acid
  misc_feature (15)..(15): Xaa can be any naturally occurring amino acid
  misc_feature (17)..(17): Xaa can be any naturally occurring amino acid
CCEYCCXNPXACTGXCXY

SEQ ID NO: 2706 - protein, 17 aa, Artificial Sequence
  Synthetically generated peptide
  VARIANT (7)..(10): Xaa = Any Amino Acid
  misc_feature (16)..(16): Xaa can be any naturally occurring amino acid
CCEYCCXNPXACTGCXY

SEQ ID NO: 2707 - protein, 18 aa, Artificial Sequence
  Synthetically generated peptide
  VARIANT (7)..(10): Xaa = Any Amino Acid
  misc_feature (16)..(17): Xaa can be any naturally occurring amino acid
CCEYCCXNPXACTGCXXY

SEQ ID NO: 2708 - protein, 16 aa, Artificial Sequence
  Synthetically generated peptide
  VARIANT (7)..(11): Xaa = Any Amino Acid
CCEYCCXNPAXCTGCY

SEQ ID NO: 2709 - protein, 17 aa, Artificial Sequence
  Synthetically generated peptide
  VARIANT (7)..(11): Xaa = Any Amino Acid
  misc_feature (12)..(12): Xaa can be any naturally occurring amino acid
CCEYCCXNPAXXCTGCY

SEQ ID NO: 2710 - protein, 18 aa, Artificial Sequence
  Synthetically generated peptide
  VARIANT (7)..(11): Xaa = Any Amino Acid
  misc_feature (12)..(13): Xaa can be any naturally occurring amino acid
CCEYCCXNPAXXXCTGCY

SEQ ID NO: 2711 - protein, 18 aa, Artificial Sequence
  Synthetically generated peptide
  VARIANT (7)..(11): Xaa = Any Amino Acid
  misc_feature (12)..(12): Xaa can be any naturally occurring amino acid
  misc_feature (14)..(14): Xaa can be any naturally occurring amino acid
CCEYCCXNPAXXCXTGCY

SEQ ID NO: 2712 - protein, 18 aa, Artificial Sequence
  Synthetically generated peptide
  VARIANT (7)..(11): Xaa = Any Amino Acid
  misc_feature (12)..(12): Xaa can be any naturally occurring amino acid
  misc_feature (15)..(15): Xaa can be any naturally occurring amino acid
CCEYCCXNPAXXCTXGCY

SEQ ID NO: 2713 - protein, 18 aa, Artificial Sequence
  Synthetically generated peptide
  VARIANT (7)..(11): Xaa = Any Amino Acid
  misc_feature (12)..(12): Xaa can be any naturally occurring amino acid
  misc_feature (16)..(16): Xaa can be any naturally occurring amino acid
CCEYCCXNPAXXCTGXCY

SEQ ID NO: 2714 - protein, 18 aa, Artificial Sequence
  Synthetically generated peptide
  VARIANT (7)..(11): Xaa = Any Amino Acid
  misc_feature (12)..(12): Xaa can be any naturally occurring amino acid
  misc_feature (17)..(17): Xaa can be any naturally occurring amino acid
CCEYCCXNPAXXCTGCXY

SEQ ID NO: 2715 - protein, 17 aa, Artificial Sequence
  Synthetically generated peptide
  VARIANT (7)..(11): Xaa = Any Amino Acid
  misc_feature (13)..(13): Xaa can be any naturally occurring amino acid
CCEYCCXNPAXCXTGCY

SEQ ID NO: 2716 - protein, 18 aa, Artificial Sequence
  Synthetically generated peptide
  VARIANT (7)..(11): Xaa = Any Amino Acid
  misc_feature (13)..(14): Xaa can be any naturally occurring amino acid
CCEYCCXNPAXCXXTGCY

SEQ ID NO: 2717 - protein, 18 aa, Artificial Sequence
  Synthetically generated peptide
  VARIANT (7)..(11): Xaa = Any Amino Acid
  misc_feature (13)..(13): Xaa can be any naturally occurring amino acid
  misc_feature (15)..(15): Xaa can be any naturally occurring amino acid
CCEYCCXNPAXCXTXGCY

SEQ ID NO: 2718 - protein, 18 aa, Artificial Sequence
  Synthetically generated peptide
  VARIANT (7)..(11): Xaa = Any Amino Acid
  misc_feature (13)..(13): Xaa can be any naturally occurring amino acid
  misc_feature (16)..(16): Xaa can be any naturally occurring amino acid
CCEYCCXNPAXCXTGXCY

SEQ ID NO: 2719 - protein, 18 aa, Artificial Sequence
  Synthetically generated peptide
  VARIANT (7)..(11): Xaa = Any Amino Acid
  misc_feature (13)..(13): Xaa can be any naturally occurring amino acid
  misc_feature (17)..(17): Xaa can be any naturally occurring amino acid
CCEYCCXNPAXCXTGCXY

SEQ ID NO: 2720 - protein, 17 aa, Artificial Sequence
  Synthetically generated peptide
  VARIANT (7)..(11): Xaa = Any Amino Acid
  misc_feature (14)..(14): Xaa can be any naturally occurring amino acid
CCEYCCXNPAXCTXGCY

SEQ ID NO: 2721 - protein, 18 aa, Artificial Sequence
  Synthetically generated peptide
  VARIANT (7)..(11): Xaa = Any Amino Acid
  misc_feature (14)..(15): Xaa can be any naturally occurring amino acid
CCEYCCXNPAXCTXXGCY

SEQ ID NO: 2722 - protein, 18 aa, Artificial Sequence
  Synthetically generated peptide
  VARIANT (7)..(11): Xaa = Any Amino Acid
  misc_feature (14)..(14): Xaa can be any naturally occurring amino acid
  misc_feature (16)..(16): Xaa can be any naturally occurring amino acid
CCEYCCXNPAXCTXGXCY

SEQ ID NO: 2723 - protein, 18 aa, Artificial Sequence
  Synthetically generated peptide
  VARIANT (7)..(11): Xaa = Any Amino Acid
  misc_feature (14)..(14): Xaa can be any naturally occurring amino acid
  misc_feature (17)..(17): Xaa can be any naturally occurring amino acid
CCEYCCXNPAXCTXGCXY

SEQ ID NO: 2724 - protein, 17 aa, Artificial Sequence
  Synthetically generated peptide
  VARIANT (7)..(11): Xaa = Any Amino Acid
  misc_feature (15)..(15): Xaa can be any naturally occurring amino acid
CCEYCCXNPAXCTGXCY

SEQ ID NO: 2725 - protein, 18 aa, Artificial Sequence
  Synthetically generated peptide
  VARIANT (7)..(11): Xaa = Any Amino Acid
  misc_feature (15)..(16): Xaa can be any naturally occurring amino acid
CCEYCCXNPAXCTGXXCY

SEQ ID NO: 2726 - protein, 18 aa, Artificial Sequence
  Synthetically generated peptide
  VARIANT (7)..(11): Xaa = Any Amino Acid
  misc_feature (15)..(15): Xaa can be any naturally occurring amino acid
  misc_feature (17)..(17): Xaa can be any naturally occurring amino acid
CCEYCCXNPAXCTGXCXY

SEQ ID NO: 2727 - protein, 17 aa, Artificial Sequence
  Synthetically generated peptide
  VARIANT (7)..(11): Xaa = Any Amino Acid
  misc_feature (16)..(16): Xaa can be any naturally occurring amino acid
CCEYCCXNPAXCTGCXY

SEQ ID NO: 2728 - protein, 18 aa, Artificial Sequence
  Synthetically generated peptide
  VARIANT (7)..(11): Xaa = Any Amino Acid
  misc_feature (16)..(17): Xaa can be any naturally occurring amino acid
CCEYCCXNPAXCTGCXXY

SEQ ID NO: 2729 - protein, 16 aa, Artificial Sequence
  Synthetically generated peptide
  VARIANT (7)..(12): Xaa = Any Amino Acid
CCEYCCXNPACXTGCY

SEQ ID NO: 2730 - protein, 17 aa, Artificial Sequence
  Synthetically generated peptide
  VARIANT (7)..(12): Xaa = Any Amino Acid
  misc_feature (13)..(13): Xaa can be any naturally occurring amino acid
CCEYCCXNPACXXTGCY

SEQ ID NO: 2731 - protein, 18 aa, Artificial Sequence
  Synthetically generated peptide
  VARIANT (7)..(12): Xaa = Any Amino Acid
  misc_feature (13)..(14): Xaa can be any naturally occurring amino acid
CCEYCCXNPACXXXTGCY

SEQ ID NO: 2732 - protein, 18 aa, Artificial Sequence
  Synthetically generated peptide
  VARIANT (7)..(12): Xaa = Any Amino Acid
  misc_feature (13)..(13): Xaa can be any naturally occurring amino acid
  misc_feature (15)..(15): Xaa can be any naturally occurring amino acid
CCEYCCXNPACXXTXGCY

SEQ ID NO: 2733 - protein, 18 aa, Artificial Sequence
  Synthetically generated peptide
  VARIANT (7)..(12): Xaa = Any Amino Acid
  misc_feature (13)..(13): Xaa can be any naturally occurring amino acid
  misc_feature (16)..(16): Xaa can be any naturally occurring amino acid
CCEYCCXNPACXXTGXCY

SEQ ID NO: 2734 - protein, 18 aa, Artificial Sequence
  Synthetically generated peptide
  VARIANT (7)..(12): Xaa = Any Amino Acid
  misc_feature (13)..(13): Xaa can be any naturally occurring amino acid
  misc_feature (17)..(17): Xaa can be any naturally occurring amino acid
CCEYCCXNPACXXTGCXY

SEQ ID NO: 2735 - protein, 17 aa, Artificial Sequence
  Synthetically generated peptide
  VARIANT (7)..(12): Xaa = Any Amino Acid
  misc_feature (14)..(14): Xaa can be any naturally occurring amino acid
CCEYCCXNPACXTXGCY

SEQ ID NO: 2736 - protein, 18 aa, Artificial Sequence
  Synthetically generated peptide
  VARIANT (7)..(12): Xaa = Any Amino Acid
  misc_feature (14)..(15): Xaa can be any naturally occurring amino acid
CCEYCCXNPACXTXXGCY

SEQ ID NO: 2737 - protein, 18 aa, Artificial Sequence
  Synthetically generated peptide
  VARIANT (7)..(12): Xaa = Any Amino Acid
  misc_feature (14)..(14): Xaa can be any naturally occurring amino acid
  misc_feature (16)..(16): Xaa can be any naturally occurring amino acid
CCEYCCXNPACXTXGXCY

SEQ ID NO: 2738 - protein, 18 aa, Artificial Sequence
  Synthetically generated peptide
  VARIANT (7)..(12): Xaa = Any Amino Acid
  misc_feature (14)..(14): Xaa can be any naturally occurring amino acid
  misc_feature (17)..(17): Xaa can be any naturally occurring amino acid
CCEYCCXNPACXTXGCXY

SEQ ID NO: 2739 - protein, 17 aa, Artificial Sequence
  Synthetically generated peptide
  VARIANT (7)..(12): Xaa = Any Amino Acid
  misc_feature (15)..(15): Xaa can be any naturally occurring amino acid
CCEYCCXNPACXTGXCY

SEQ ID NO: 2740 - protein, 18 aa, Artificial Sequence
  Synthetically generated peptide
  VARIANT (7)..(12): Xaa = Any Amino Acid
  misc_feature (15)..(16): Xaa can be any naturally occurring amino acid
CCEYCCXNPACXTGXXCY

SEQ ID NO: 2741 - protein, 18 aa, Artificial Sequence
  Synthetically generated peptide
  VARIANT (7)..(12): Xaa = Any Amino Acid
  misc_feature (15)..(15): Xaa can be any naturally occurring amino acid
  misc_feature (17)..(17): Xaa can be any naturally occurring amino acid
CCEYCCXNPACXTGXCXY

SEQ ID NO: 2742 - protein, 17 aa, Artificial Sequence
  Synthetically generated peptide
  VARIANT (7)..(12): Xaa = Any Amino Acid
  misc_feature (16)..(16): Xaa can be any naturally occurring amino acid
CCEYCCXNPACXTGCXY

SEQ ID NO: 2743 - protein, 18 aa, Artificial Sequence
  Synthetically generated peptide
  VARIANT (7)..(12): Xaa = Any Amino Acid
  misc_feature (16)..(17): Xaa can be any naturally occurring amino acid
CCEYCCXNPACXTGCXXY

SEQ ID NO: 2744 - protein, 16 aa, Artificial Sequence
  Synthetically generated peptide
  VARIANT (1)..(16): Xaa = Any Amino Acid
  VARIANT (7)..(13): Xaa = Any Amino Acid
CCEYCCXNPACTXGCY

SEQ ID NO: 2745 - protein, 17 aa, Artificial Sequence
  Synthetically generated peptide
  VARIANT (7)..(13): Xaa = Any Amino Acid
  misc_feature (14)..(14): Xaa can be any naturally occurring amino acid
CCEYCCXNPACTXXGCY

SEQ ID NO: 2746 - protein, 18 aa, Artificial Sequence
  Synthetically generated peptide
  VARIANT (7)..(13): Xaa = Any Amino Acid
  misc_feature (14)..(15): Xaa can be any naturally occurring amino acid
CCEYCCXNPACTXXXGCY

SEQ ID NO: 2747 - protein, 18 aa, Artificial Sequence
  Synthetically generated peptide
  VARIANT (7)..(13): Xaa = Any Amino Acid
  misc_feature (14)..(14): Xaa can be any naturally occurring amino acid
  misc_feature (16)..(16): Xaa can be any naturally occurring amino acid
CCEYCCXNPACTXXGXCY

SEQ ID NO: 2748 - protein, 18 aa, Artificial Sequence
  Synthetically generated peptide
  VARIANT (7)..(13): Xaa = Any Amino Acid
  misc_feature (14)..(14): Xaa can be any naturally occurring amino acid
  misc_feature (17)..(17): Xaa can be any naturally occurring amino acid
CCEYCCXNPACTXXGCXY

SEQ ID NO: 2749 - protein, 17 aa, Artificial Sequence
  Synthetically generated peptide
  VARIANT (7)..(13): Xaa = Any Amino Acid
  misc_feature (15)..(15): Xaa can be any naturally occurring amino acid
CCEYCCXNPACTXGXCY

SEQ ID NO: 2750 - protein, 18 aa, Artificial Sequence
  Synthetically generated peptide
  VARIANT (7)..(13): Xaa = Any Amino Acid
  misc_feature (15)..(16): Xaa can be any naturally occurring amino acid
CCEYCCXNPACTXGXXCY

SEQ ID NO: 2751 - protein, 18 aa, Artificial Sequence
  Synthetically generated peptide
  VARIANT (7)..(13): Xaa = Any Amino Acid
  misc_feature (15)..(15): Xaa can be any naturally occurring amino acid
  misc_feature (17)..(17): Xaa can be any naturally occurring amino acid
CCEYCCXNPACTXGXCXY

SEQ ID NO: 2752 - protein, 17 aa, Artificial Sequence
  Synthetically generated peptide
  VARIANT (7)..(13): Xaa = Any Amino Acid
  misc_feature (16)..(16): Xaa can be any naturally occurring amino acid
CCEYCCXNPACTXGCXY

SEQ ID NO: 2753 - protein, 18 aa, Artificial Sequence
  Synthetically generated peptide
  VARIANT (7)..(13): Xaa = Any Amino Acid
  misc_feature (16)..(17): Xaa can be any naturally occurring amino acid
CCEYCCXNPACTXGCXXY

SEQ ID NO: 2754 - protein, 16 aa, Artificial Sequence
  Synthetically generated peptide
  VARIANT (7)..(14): Xaa = Any Amino Acid
CCEYCCXNPACTGXCY

SEQ ID NO: 2755 - protein, 17 aa, Artificial Sequence
  Synthetically generated peptide
  VARIANT (7)..(14): Xaa = Any Amino Acid
  misc_feature (15)..(15): Xaa can be any naturally occurring amino acid
CCEYCCXNPACTGXXCY

SEQ ID NO: 2756 - protein, 18 aa, Artificial Sequence
  Synthetically generated peptide
  VARIANT (7)..(14): Xaa = Any Amino Acid
  misc_feature (15)..(16): Xaa can be any naturally occurring amino acid
CCEYCCXNPACTGXXXCY

SEQ ID NO: 2757 - protein, 18 aa, Artificial Sequence
  Synthetically generated peptide
  VARIANT (7)..(14): Xaa = Any Amino Acid
  misc_feature (15)..(15): Xaa can be any naturally occurring amino acid
  misc_feature (17)..(17): Xaa can be any naturally occurring amino acid
CCEYCCXNPACTGXXCXY

SEQ ID NO: 2758 - protein, 17 aa, Artificial Sequence
  Synthetically generated peptide
  VARIANT (7)..(14): Xaa = Any Amino Acid
  misc_feature (16)..(16): Xaa can be any naturally occurring amino acid
CCEYCCXNPACTGXCXY

SEQ ID NO: 2759 - protein, 18 aa, Artificial Sequence
  Synthetically generated peptide
  VARIANT (7)..(14): Xaa = Any Amino Acid
  misc_feature (16)..(17): Xaa can be any naturally occurring amino acid
CCEYCCXNPACTGXCXXY

SEQ ID NO: 2760 - protein, 16 aa, Artificial Sequence
  Synthetically generated peptide
  VARIANT (7)..(15): Xaa = Any Amino Acid
CCEYCCXNPACTGCXY

SEQ ID NO: 2761 - protein, 17 aa, Artificial Sequence
  Synthetically generated peptide
  VARIANT (7)..(15): Xaa = Any Amino Acid
  misc_feature (16)..(16): Xaa can be any naturally occurring amino acid
CCEYCCXNPACTGCXXY

SEQ ID NO: 2762 - protein, 18 aa, Artificial Sequence
  Synthetically generated peptide
  VARIANT (7)..(15): Xaa = Any Amino Acid
  misc_feature (16)..(17): Xaa can be any naturally occurring amino acid
CCEYCCXNPACTGCXXXY

SEQ ID NO: 2763 - protein, 15 aa, Artificial Sequence
  Synthetically generated peptide
  VARIANT (8)..(8): Xaa = Any Amino Acid
CCEYCCNXPACTGCY

SEQ ID NO: 2764 - protein, 16 aa, Artificial Sequence
  Synthetically generated peptide
  VARIANT (8)..(9): Xaa = Any Amino Acid
CCEYCCNXXPACTGCY

SEQ ID NO: 2765 - protein, 17 aa, Artificial Sequence
  Synthetically generated peptide
  VARIANT (8)..(9): Xaa = Any Amino Acid
  misc_feature (10)..(10): Xaa can be any naturally occurring amino acid
CCEYCCNXXXPACTGCY

SEQ ID NO: 2766 - protein, 18 aa, Artificial Sequence
  Synthetically generated peptide
  VARIANT (8)..(9): Xaa = Any Amino Acid
  misc_feature (10)..(11): Xaa can be any naturally occurring amino acid
CCEYCCNXXXXPACTGCY

SEQ ID NO: 2767 - protein, 18 aa, Artificial Sequence
  Synthetically generated peptide
  VARIANT (8)..(9): Xaa = Any Amino Acid
  misc_feature (10)..(10): Xaa can be any naturally occurring amino acid
  misc_feature (12)..(12): Xaa can be any naturally occurring amino acid
CCEYCCNXXXPXACTGCY

SEQ ID NO: 2768 - protein, 18 aa, Artificial Sequence
  Synthetically generated peptide
  VARIANT (8)..(9): Xaa = Any Amino Acid
  misc_feature (10)..(10): Xaa can be any naturally occurring amino acid
  misc_feature (13)..(13): Xaa can be any naturally occurring amino acid
CCEYCCNXXXPAXCTGCY

SEQ ID NO: 2769 - protein, 18 aa, Artificial Sequence
  Synthetically generated peptide
  VARIANT (8)..(9): Xaa = Any Amino Acid
  misc_feature (10)..(10): Xaa can be any naturally occurring amino acid
  misc_feature (14)..(14): Xaa can be any naturally occurring amino acid
CCEYCCNXXXPACXTGCY

SEQ ID NO: 2770 - protein, 18 aa, Artificial Sequence
  Synthetically generated peptide
  VARIANT (8)..(9): Xaa = Any Amino Acid
  misc_feature (10)..(10): Xaa can be any naturally occurring amino acid
  misc_feature (15)..(15): Xaa can be any naturally occurring amino acid
CCEYCCNXXXPACTXGCY

SEQ ID NO: 2771 - protein, 18 aa, Artificial Sequence
  Synthetically generated peptide
  VARIANT (8)..(9): Xaa = Any Amino Acid
  misc_feature (10)..(10): Xaa can be any naturally occurring amino acid
  misc_feature (16)..(16): Xaa can be any naturally occurring amino acid
CCEYCCNXXXPACTGXCY

SEQ ID NO: 2772 - protein, 18 aa, Artificial Sequence
  Synthetically generated peptide
  VARIANT (8)..(9): Xaa = Any Amino Acid
  misc_feature (10)..(10): Xaa can be any naturally occurring amino acid
  misc_feature (17)..(17): Xaa can be any naturally occurring amino acid
CCEYCCNXXXPACTGCXY

SEQ ID NO: 2773 - protein, 17 aa, Artificial Sequence
  Synthetically generated peptide
  VARIANT (8)..(9): Xaa = Any Amino Acid
  misc_feature (11)..(11): Xaa can be any naturally occurring amino acid
CCEYCCNXXPXACTGCY

SEQ ID NO: 2774 - protein, 18 aa, Artificial Sequence
  Synthetically generated peptide
  VARIANT (8)..(9): Xaa = Any Amino Acid
  misc_feature (11)..(12): Xaa can be any naturally occurring amino acid
CCEYCCNXXPXXACTGCY

SEQ ID NO: 2775 - protein, 18 aa, Artificial Sequence
  Synthetically generated peptide
  VARIANT (8)..(9): Xaa = Any Amino Acid
  misc_feature (11)..(11): Xaa can be any naturally occurring amino acid
  misc_feature (13)..(13): Xaa can be any naturally occurring amino acid
CCEYCCNXXPXAXCTGCY

SEQ ID NO: 2776 - protein, 18 aa, Artificial Sequence
  Synthetically generated peptide
  VARIANT (8)..(9): Xaa = Any Amino Acid
  misc_feature (11)..(11): Xaa can be any naturally occurring amino acid
  misc_feature (14)..(14): Xaa can be any naturally occurring amino acid
CCEYCCNXXPXACXTGCY

SEQ ID NO: 2777 - protein, 18 aa, Artificial Sequence
  Synthetically generated peptide
  VARIANT (8)..(9): Xaa = Any Amino Acid
  misc_feature (11)..(11): Xaa can be any naturally occurring amino acid
  misc_feature (15)..(15): Xaa can be any naturally occurring amino acid
CCEYCCNXXPXACTXGCY

SEQ ID NO: 2778 - protein, 18 aa, Artificial Sequence
  Synthetically generated peptide
  VARIANT (8)..(9): Xaa = Any Amino Acid
  misc_feature (11)..(11): Xaa can be any naturally occurring amino acid
  misc_feature (16)..(16): Xaa can be any naturally occurring amino acid
CCEYCCNXXPXACTGXCY

SEQ ID NO: 2779 - protein, 18 aa, Artificial Sequence
  Synthetically generated peptide
  VARIANT (8)..(9): Xaa = Any Amino Acid
  misc_feature (11)..(11): Xaa can be any naturally occurring amino acid
  misc_feature (17)..(17): Xaa can be any naturally occurring amino acid
CCEYCCNXXPXACTGCXY

SEQ ID NO: 2780 - protein, 17 aa, Artificial Sequence
  Synthetically generated peptide
  VARIANT (8)..(9): Xaa = Any Amino Acid
  misc_feature (12)..(12): Xaa can be any naturally occurring amino acid
CCEYCCNXXPAXCTGCY

SEQ ID NO: 2781 - protein, 18 aa, Artificial Sequence
  Synthetically generated peptide
  VARIANT (8)..(9): Xaa = Any Amino Acid
  misc_feature (12)..(13): Xaa can be any naturally occurring amino acid
CCEYCCNXXPAXXCTGCY

SEQ ID NO: 2782 - protein, 18 aa, Artificial Sequence
  Synthetically generated peptide
  VARIANT (8)..(9): Xaa = Any Amino Acid
  misc_feature (12)..(12): Xaa can be any naturally occurring amino acid
  misc_feature (14)..(14): Xaa can be any naturally occurring amino acid
CCEYCCNXXPAXCXTGCY

SEQ ID NO: 2783 - protein, 18 aa, Artificial Sequence
  Synthetically generated peptide
  VARIANT (8)..(9): Xaa = Any Amino Acid
  misc_feature (12)..(12): Xaa can be any naturally occurring amino acid
  misc_feature (15)..(15): Xaa can be any naturally occurring amino acid
CCEYCCNXXPAXCTXGCY

SEQ ID NO: 2784 - protein, 18 aa, Artificial Sequence
  Synthetically generated peptide
  VARIANT (8)..(9): Xaa = Any Amino Acid
  misc_feature (12)..(12): Xaa can be any naturally occurring amino acid
  misc_feature (16)..(16): Xaa can be any naturally occurring amino acid
CCEYCCNXXPAXCTGXCY

SEQ ID NO: 2785 - protein, 18 aa, Artificial Sequence
  Synthetically generated peptide
  VARIANT (8)..(9): Xaa = Any Amino Acid
  misc_feature (12)..(12): Xaa can be any naturally occurring amino acid
  misc_feature (17)..(17): Xaa can be any naturally occurring amino acid
CCEYCCNXXPAXCTGCXY

SEQ ID NO: 2786 - protein, 17 aa, Artificial Sequence
  Synthetically generated peptide
  VARIANT (8)..(9): Xaa = Any Amino Acid
  misc_feature (13)..(13): Xaa can be any naturally occurring amino acid
CCEYCCNXXPACXTGCY

SEQ ID NO: 2787 - protein, 18 aa, Artificial Sequence
  Synthetically generated peptide
  VARIANT (8)..(9): Xaa = Any Amino Acid
  misc_feature (13)..(14): Xaa can be any naturally occurring amino acid
CCEYCCNXXPACXXTGCY

SEQ ID NO: 2788 - protein, 18 aa, Artificial Sequence
  Synthetically generated peptide
  VARIANT (8)..(9): Xaa = Any Amino Acid
  misc_feature (13)..(13): Xaa can be any naturally occurring amino acid
  misc_feature (15)..(15): Xaa can be any naturally occurring amino acid
CCEYCCNXXPACXTXGCY

SEQ ID NO: 2789 - protein, 18 aa, Artificial Sequence
  Synthetically generated peptide
  VARIANT (8)..(9): Xaa = Any Amino Acid
  misc_feature (13)..(13): Xaa can be any naturally occurring amino acid
  misc_feature (16)..(16): Xaa can be any naturally occurring amino acid
CCEYCCNXXPACXTGXCY

SEQ ID NO: 2790 - protein, 18 aa, Artificial Sequence
  Synthetically generated peptide
  VARIANT (8)..(9): Xaa = Any Amino Acid
  misc_feature (13)..(13): Xaa can be any naturally occurring amino acid
  misc_feature (17)..(17): Xaa can be any naturally occurring amino acid
CCEYCCNXXPACXTGCXY

SEQ ID NO: 2791 - protein, 17 aa, Artificial Sequence
  Synthetically generated peptide
  VARIANT (8)..(9): Xaa = Any Amino Acid
  misc_feature (14)..(14): Xaa can be any naturally occurring amino acid
CCEYCCNXXPACTXGCY

SEQ ID NO: 2792 - protein, 18 aa, Artificial Sequence
  Synthetically generated peptide
  VARIANT (8)..(9): Xaa = Any Amino Acid
  misc_feature (14)..(15): Xaa can be any naturally occurring amino acid
CCEYCCNXXPACTXXGCY

SEQ ID NO: 2793 - protein, 18 aa, Artificial Sequence
  Synthetically generated peptide
  VARIANT (8)..(9): Xaa = Any Amino Acid
  misc_feature (14)..(14): Xaa can be any naturally occurring amino acid
  misc_feature (16)..(16): Xaa can be any naturally occurring amino acid
CCEYCCNXXPACTXGXCY

SEQ ID NO: 2794 - protein, 18 aa, Artificial Sequence
  Synthetically generated peptide
  VARIANT (8)..(9): Xaa = Any Amino Acid
  misc_feature (14)..(14): Xaa can be any naturally occurring amino acid
  misc_feature (17)..(17): Xaa can be any naturally occurring amino acid
CCEYCCNXXPACTXGCXY

SEQ ID NO: 2795 - protein, 17 aa, Artificial Sequence
  Synthetically generated peptide
  VARIANT (8)..(9): Xaa = Any Amino Acid
  misc_feature (15)..(15): Xaa can be any naturally occurring amino acid
CCEYCCNXXPACTGXCY

SEQ ID NO: 2796 - protein, 18 aa, Artificial Sequence
  Synthetically generated peptide
  VARIANT (8)..(9): Xaa = Any Amino Acid
  misc_feature (15)..(16): Xaa can be any naturally occurring amino acid
CCEYCCNXXPACTGXXCY

SEQ ID NO: 2797 - protein, 18 aa, Artificial Sequence
  Synthetically generated peptide
  VARIANT (8)..(9): Xaa = Any Amino Acid
  misc_feature (15)..(15): Xaa can be any naturally occurring amino acid
  misc_feature (17)..(17): Xaa can be any naturally occurring amino acid
CCEYCCNXXPACTGXCXY

SEQ ID NO: 2798 - protein, 17 aa, Artificial Sequence
  Synthetically generated peptide
  VARIANT (8)..(9): Xaa = Any Amino Acid
  misc_feature (16)..(16): Xaa can be any naturally occurring amino acid
CCEYCCNXXPACTGCXY

SEQ ID NO: 2799 - protein, 18 aa, Artificial Sequence
  Synthetically generated peptide
  VARIANT (8)..(9): Xaa = Any Amino Acid
  misc_feature (16)..(17): Xaa can be any naturally occurring amino acid
CCEYCCNXXPACTGCXXY

SEQ ID NO: 2800 - protein, 16 aa, Artificial Sequence
  Synthetically generated peptide
  VARIANT (8)..(10): Xaa = Any Amino Acid
CCEYCCNXPXACTGCY

SEQ ID NO: 2801 - protein, 17 aa, Artificial Sequence
  Synthetically generated peptide
  VARIANT (8)..(10): Xaa = Any Amino Acid
  misc_feature (11)..(11): Xaa can be any naturally occurring amino acid
CCEYCCNXPXXACTGCY

SEQ ID NO: 2802 - protein, 18 aa, Artificial Sequence
  Synthetically generated peptide
  VARIANT (8)..(10): Xaa = Any Amino Acid
  misc_feature (11)..(12): Xaa can be any naturally occurring amino acid
CCEYCCNXPXXXACTGCY

SEQ ID NO: 2803 - protein, 18 aa, Artificial Sequence
  Synthetically generated peptide
  VARIANT (8)..(10): Xaa = Any Amino Acid
  misc_feature (11)..(11): Xaa can be any naturally occurring amino acid
  misc_feature (13)..(13): Xaa can be any naturally occurring amino acid
CCEYCCNXPXXAXCTGCY

SEQ ID NO: 2804 - protein, 18 aa, Artificial Sequence
  Synthetically generated peptide
  VARIANT (8)..(10): Xaa = Any Amino Acid
  misc_feature (11)..(11): Xaa can be any naturally occurring amino acid
  misc_feature (14)..(14): Xaa can be any naturally occurring amino acid
CCEYCCNXPXXACXTGCY

SEQ ID NO: 2805 - protein, 18 aa, Artificial Sequence
  Synthetically generated peptide
  VARIANT (8)..(10): Xaa = Any Amino Acid
  misc_feature (11)..(11): Xaa can be any naturally occurring amino acid
  misc_feature (15)..(15): Xaa can be any naturally occurring amino acid
CCEYCCNXPXXACTXGCY

SEQ ID NO: 2806 - protein, 18 aa, Artificial Sequence
  Synthetically generated peptide
  VARIANT (8)..(10): Xaa = Any Amino Acid
  misc_feature (11)..(11): Xaa can be any naturally occurring amino acid
  misc_feature (16)..(16): Xaa can be any naturally occurring amino acid
CCEYCCNXPXXACTGXCY

SEQ ID NO: 2807 - protein, 18 aa, Artificial Sequence
  Synthetically generated peptide
  VARIANT (8)..(10): Xaa = Any Amino Acid
  misc_feature (11)..(11): Xaa can be any naturally occurring amino acid
  misc_feature (17)..(17): Xaa can be any naturally occurring amino acid
CCEYCCNXPXXACTGCXY

SEQ ID NO: 2808 - protein, 17 aa, Artificial Sequence
  Synthetically generated peptide
  VARIANT (8)..(10): Xaa = Any Amino Acid
  misc_feature (12)..(12): Xaa can be any naturally occurring amino acid
CCEYCCNXPXAXCTGCY

SEQ ID NO: 2809 - protein, 18 aa, Artificial Sequence
  Synthetically generated peptide
  VARIANT (8)..(10): Xaa = Any Amino Acid
  misc_feature (12)..(13): Xaa can be any naturally occurring amino acid
CCEYCCNXPXAXXCTGCY

SEQ ID NO: 2810 - protein, 18 aa, Artificial Sequence
  Synthetically generated peptide
  VARIANT (8)..(10): Xaa = Any Amino Acid
  misc_feature (12)..(12): Xaa can be any naturally occurring amino acid
  misc_feature (14)..(14): Xaa can be any naturally occurring amino acid
CCEYCCNXPXAXCXTGCY

SEQ ID NO: 2811 - protein, 18 aa, Artificial Sequence
  Synthetically generated peptide
  VARIANT (8)..(10): Xaa = Any Amino Acid
  misc_feature (12)..(12): Xaa can be any naturally occurring amino acid
  misc_feature (15)..(15): Xaa can be any naturally occurring amino acid
CCEYCCNXPXAXCTXGCY

SEQ ID NO: 2812 - protein, 18 aa, Artificial Sequence
  Synthetically generated peptide
  VARIANT (8)..(10): Xaa = Any Amino Acid
  misc_feature (12)..(12): Xaa can be any naturally occurring amino acid
  misc_feature (16)..(16): Xaa can be any naturally occurring amino acid
CCEYCCNXPXAXCTGXCY

SEQ ID NO: 2813 - protein, 18 aa, Artificial Sequence
  Synthetically generated peptide
  VARIANT (8)..(10): Xaa = Any Amino Acid
  misc_feature (12)..(12): Xaa can be any naturally occurring amino acid
  misc_feature (17)..(17): Xaa can be any naturally occurring amino acid
CCEYCCNXPXAXCTGCXY

SEQ ID NO: 2814 - protein, 17 aa, Artificial Sequence
  Synthetically generated peptide
  VARIANT (8)..(10): Xaa = Any Amino Acid
  misc_feature (13)..(13): Xaa can be any naturally occurring amino acid
CCEYCCNXPXACXTGCY

SEQ ID NO: 2815 - protein, 18 aa, Artificial Sequence
  Synthetically generated peptide
  VARIANT (8)..(10): Xaa = Any Amino Acid
  misc_feature (13)..(14): Xaa can be any naturally occurring amino acid
CCEYCCNXPXACXXTGCY

SEQ ID NO: 2816 - protein, 18 aa, Artificial Sequence
  Synthetically generated peptide
  VARIANT (8)..(10): Xaa = Any Amino Acid
  misc_feature (13)..(13): Xaa can be any naturally occurring amino acid
  misc_feature (15)..(15): Xaa can be any naturally occurring amino acid
CCEYCCNXPXACXTXGCY

SEQ ID NO: 2817 - protein, 18 aa, Artificial Sequence
  Synthetically generated peptide
  VARIANT (8)..(10): Xaa = Any Amino Acid
  misc_feature (13)..(13): Xaa can be any naturally occurring amino acid
  misc_feature (16)..(16): Xaa can be any naturally occurring amino acid
CCEYCCNXPXACXTGXCY

SEQ ID NO: 2818 - protein, 18 aa, Artificial Sequence
  Synthetically generated peptide
  VARIANT (8)..(10): Xaa = Any Amino Acid
  misc_feature (13)..(13): Xaa can be any naturally occurring amino acid
  misc_feature (17)..(17): Xaa can be any naturally occurring amino acid
CCEYCCNXPXACXTGCXY

SEQ ID NO: 2819 - protein, 17 aa, Artificial Sequence
  Synthetically generated peptide
  VARIANT (8)..(10): Xaa = Any Amino Acid
  misc_feature (14)..(14): Xaa can be any naturally occurring amino acid
CCEYCCNXPXACTXGCY

SEQ ID NO: 2820 - protein, 18 aa, Artificial Sequence
  Synthetically generated peptide
  VARIANT (8)..(10): Xaa = Any Amino Acid
  misc_feature (14)..(15): Xaa can be any naturally occurring amino acid
CCEYCCNXPXACTXXGCY

SEQ ID NO: 2821 - protein, 18 aa, Artificial Sequence
  Synthetically generated peptide
  VARIANT (8)..(10): Xaa = Any Amino Acid
  misc_feature (14)..(14): Xaa can be any naturally occurring amino acid
  misc_feature (16)..(16): Xaa can be any naturally occurring amino acid
CCEYCCNXPXACTXGXCY

SEQ ID NO: 2822 - protein, 18 aa, Artificial Sequence
  Synthetically generated peptide
  VARIANT (8)..(10): Xaa = Any Amino Acid
  misc_feature (14)..(14): Xaa can be any naturally occurring amino acid
  misc_feature (17)..(17): Xaa can be any naturally occurring amino acid
CCEYCCNXPXACTXGCXY

SEQ ID NO: 2823 - protein, 17 aa, Artificial Sequence
  Synthetically generated peptide
  VARIANT (8)..(10): Xaa = Any Amino Acid
  misc_feature (15)..(15): Xaa can be any naturally occurring amino acid
CCEYCCNXPXACTGXCY

SEQ ID NO: 2824 - protein, 18 aa, Artificial Sequence
  Synthetically generated peptide
  VARIANT (8)..(10): Xaa = Any Amino Acid
  misc_feature (15)..(16): Xaa can be any naturally occurring amino acid
CCEYCCNXPXACTGXXCY

SEQ ID NO: 2825 - protein, 18 aa, Artificial Sequence
  Synthetically generated peptide
  VARIANT (8)..(10): Xaa = Any Amino Acid
  misc_feature (15)..(15): Xaa can be any naturally occurring amino acid
  misc_feature (17)..(17): Xaa can be any naturally occurring amino acid
CCEYCCNXPXACTGXCXY

SEQ ID NO: 2826 - protein, 17 aa, Artificial Sequence
  Synthetically generated peptide
  VARIANT (8)..(10): Xaa = Any Amino Acid
  misc_feature (16)..(16): Xaa can be any naturally occurring amino acid
CCEYCCNXPXACTGCXY

SEQ ID NO: 2827 - protein, 18 aa, Artificial Sequence
  Synthetically generated peptide
  VARIANT (8)..(10): Xaa = Any Amino Acid
  misc_feature (16)..(17): Xaa can be any naturally occurring amino acid
CCEYCCNXPXACTGCXXY

SEQ ID NO: 2828 - protein, 16 aa, Artificial Sequence
  Synthetically generated peptide
  VARIANT (8)..(11): Xaa = Any Amino Acid
CCEYCCNXPAXCTGCY

SEQ ID NO: 2829 - protein, 17 aa, Artificial Sequence
  Synthetically generated peptide
  VARIANT (8)..(11): Xaa = Any Amino Acid
  misc_feature (12)..(12): Xaa can be any naturally occurring amino acid
CCEYCCNXPAXXCTGCY

SEQ ID NO: 2830 - protein, 18 aa, Artificial Sequence
  Synthetically generated peptide
  VARIANT (8)..(11): Xaa = Any Amino Acid
  misc_feature (12)..(13): Xaa can be any naturally occurring amino acid
CCEYCCNXPAXXXCTGCY

SEQ ID NO: 2831 - protein, 18 aa, Artificial Sequence
  Synthetically generated peptide
  VARIANT (8)..(11): Xaa = Any Amino Acid
  misc_feature (12)..(12): Xaa can be any naturally occurring amino acid
  misc_feature (14)..(14): Xaa can be any naturally occurring amino acid
CCEYCCNXPAXXCXTGCY

SEQ ID NO: 2832 - protein, 18 aa, Artificial Sequence
  Synthetically generated peptide
  VARIANT (8)..(11): Xaa = Any Amino Acid
  misc_feature (12)..(12): Xaa can be any naturally occurring amino acid
  misc_feature (15)..(15): Xaa can be any naturally occurring amino acid
CCEYCCNXPAXXCTXGCY

SEQ ID NO: 2833 - protein, 18 aa, Artificial Sequence
  Synthetically generated peptide
  VARIANT (8)..(11): Xaa = Any Amino Acid
  misc_feature (12)..(12): Xaa can be any naturally occurring amino acid
  misc_feature (16)..(16): Xaa can be any naturally occurring amino acid
CCEYCCNXPAXXCTGXCY

SEQ ID NO: 2834 - protein, 18 aa, Artificial Sequence
  Synthetically generated peptide
  VARIANT (8)..(11): Xaa = Any Amino Acid
  misc_feature (12)..(12): Xaa can be any naturally occurring amino acid
  misc_feature (17)..(17): Xaa can be any naturally occurring amino acid
CCEYCCNXPAXXCTGCXY

SEQ ID NO: 2835 - protein, 17 aa, Artificial Sequence
  Synthetically generated peptide
  VARIANT (8)..(11): Xaa = Any Amino Acid
  misc_feature (13)..(13): Xaa can be any naturally occurring amino acid
CCEYCCNXPAXCXTGCY

SEQ ID NO: 2836 - protein, 18 aa, Artificial Sequence
  Synthetically generated peptide
  VARIANT (8)..(11): Xaa = Any Amino Acid
  misc_feature (13)..(14): Xaa can be any naturally occurring amino acid
CCEYCCNXPAXCXXTGCY

SEQ ID NO: 2837 - protein, 18 aa, Artificial Sequence
  Synthetically generated peptide
  VARIANT (8)..(11): Xaa = Any Amino Acid
  misc_feature (13)..(13): Xaa can be any naturally occurring amino acid
  misc_feature (15)..(15): Xaa can be any naturally occurring amino acid
CCEYCCNXPAXCXTXGCY

SEQ ID NO: 2838 - protein, 18 aa, Artificial Sequence
  Synthetically generated peptide
  VARIANT (8)..(11): Xaa = Any Amino Acid
  misc_feature (13)..(13): Xaa can be any naturally occurring amino acid
  misc_feature (16)..(16): Xaa can be any naturally occurring amino acid
CCEYCCNXPAXCXTGXCY

SEQ ID NO: 2839 - protein, 18 aa, Artificial Sequence
  Synthetically generated peptide
  VARIANT (8)..(11): Xaa = Any Amino Acid
  misc_feature (13)..(13): Xaa can be any naturally occurring amino acid
  misc_feature (17)..(17): Xaa can be any naturally occurring amino acid
CCEYCCNXPAXCXTGCXY

SEQ ID NO: 2840 - protein, 17 aa, Artificial Sequence
  Synthetically generated peptide
  VARIANT (8)..(11): Xaa = Any Amino Acid
  misc_feature (14)..(14): Xaa can be any naturally occurring amino acid
CCEYCCNXPAXCTXGCY

SEQ ID NO: 2841 - protein, 18 aa, Artificial Sequence
  Synthetically generated peptide
  VARIANT (8)..(11): Xaa = Any Amino Acid
  misc_feature (14)..(15): Xaa can be any naturally occurring amino acid
CCEYCCNXPAXCTXXGCY

SEQ ID NO: 2842 - protein, 18 aa, Artificial Sequence
  Synthetically generated peptide
  VARIANT (8)..(11): Xaa = Any Amino Acid
  misc_feature (14)..(14): Xaa can be any naturally occurring amino acid
  misc_feature (16)..(16): Xaa can be any naturally occurring amino acid
CCEYCCNXPAXCTXGXCY

SEQ ID NO: 2843 - protein, 18 aa, Artificial Sequence
  Synthetically generated peptide
  VARIANT (8)..(11): Xaa = Any Amino Acid
  misc_feature (14)..(14): Xaa can be any naturally occurring amino acid
  misc_feature (17)..(17): Xaa can be any naturally occurring amino acid
CCEYCCNXPAXCTXGCXY

SEQ ID NO: 2844 - protein, 17 aa, Artificial Sequence
  Synthetically generated peptide
  VARIANT (8)..(11): Xaa = Any Amino Acid
  misc_feature (15)..(15): Xaa can be any naturally occurring amino acid
CCEYCCNXPAXCTGXCY

SEQ ID NO: 2845 - protein, 18 aa, Artificial Sequence
  Synthetically generated peptide
  VARIANT (8)..(11): Xaa = Any Amino Acid
  misc_feature (15)..(16): Xaa can be any naturally occurring amino acid
CCEYCCNXPAXCTGXXCY

SEQ ID NO: 2846 - protein, 18 aa, Artificial Sequence
  Synthetically generated peptide
  VARIANT (8)..(11): Xaa = Any Amino Acid
  misc_feature (15)..(15): Xaa can be any naturally occurring amino acid
  misc_feature (17)..(17): Xaa can be any naturally occurring amino acid
CCEYCCNXPAXCTGXCXY

SEQ ID NO: 2847 - protein, 17 aa, Artificial Sequence
  Synthetically generated peptide
  VARIANT (8)..(11): Xaa = Any Amino Acid
  misc_feature (16)..(16): Xaa can be any naturally occurring amino acid
CCEYCCNXPAXCTGCXY

SEQ ID NO: 2848 - protein, 18 aa, Artificial Sequence
  Synthetically generated peptide
  VARIANT (8)..(11): Xaa = Any Amino Acid
  misc_feature (16)..(17): Xaa can be any naturally occurring amino acid
CCEYCCNXPAXCTGCXXY

SEQ ID NO: 2849 - protein, 16 aa, Artificial Sequence
  Synthetically generated peptide
  VARIANT (8)..(12): Xaa = Any Amino Acid
CCEYCCNXPACXTGCY

SEQ ID NO: 2850 - protein, 17 aa, Artificial Sequence
  Synthetically generated peptide
  VARIANT (8)..(12): Xaa = Any Amino Acid
  misc_feature (13)..(13): Xaa can be any naturally occurring amino acid
CCEYCCNXPACXXTGCY

SEQ ID NO: 2851 - protein, 18 aa, Artificial Sequence
  Synthetically generated peptide
  VARIANT (8)..(12): Xaa = Any Amino Acid
  misc_feature (13)..(14): Xaa can be any naturally occurring amino acid
CCEYCCNXPACXXXTGCY

SEQ ID NO: 2852 - protein, 18 aa, Artificial Sequence
  Synthetically generated peptide
  VARIANT (8)..(12): Xaa = Any Amino Acid
  misc_feature (13)..(13): Xaa can be any naturally occurring amino acid
  misc_feature (15)..(15): Xaa can be any naturally occurring amino acid
CCEYCCNXPACXXTXGCY

SEQ ID NO: 2853 - protein, 18 aa, Artificial Sequence
  Synthetically generated peptide
  VARIANT (8)..(12): Xaa = Any Amino Acid
  misc_feature (13)..(13): Xaa can be any naturally occurring amino acid
  misc_feature (16)..(16): Xaa can be any naturally occurring amino acid
CCEYCCNXPACXXTGXCY

SEQ ID NO: 2854 - protein, 18 aa, Artificial Sequence
  Synthetically generated peptide
  VARIANT (8)..(12): Xaa = Any Amino Acid
  misc_feature (13)..(13): Xaa can be any naturally occurring amino acid
  misc_feature (17)..(17): Xaa can be any naturally occurring amino acid
CCEYCCNXPACXXTGCXY

SEQ ID NO: 2855 - protein, 17 aa, Artificial Sequence
  Synthetically generated peptide
  VARIANT (8)..(12): Xaa = Any Amino Acid
  misc_feature (14)..(14): Xaa can be any naturally occurring amino acid
CCEYCCNXPACXTXGCY

SEQ ID NO: 2856 - protein, 18 aa, Artificial Sequence
  Synthetically generated peptide
  VARIANT (8)..(12): Xaa = Any Amino Acid
  misc_feature (14)..(15): Xaa can be any naturally occurring amino acid
CCEYCCNXPACXTXXGCY

SEQ ID NO: 2857 - protein, 18 aa, Artificial Sequence
  Synthetically generated peptide
  VARIANT (8)..(12): Xaa = Any Amino Acid
  misc_feature (14)..(14): Xaa can be any naturally occurring amino acid
  misc_feature (16)..(16): Xaa can be any naturally occurring amino acid
CCEYCCNXPACXTXGXCY

SEQ ID NO: 2858 - protein, 18 aa, Artificial Sequence
  Synthetically generated peptide
  VARIANT (8)..(12): Xaa = Any Amino Acid
  misc_feature (14)..(14): Xaa can be any naturally occurring amino acid
  misc_feature (17)..(17): Xaa can be any naturally occurring amino acid
CCEYCCNXPACXTXGCXY

SEQ ID NO: 2859 - protein, 17 aa, Artificial Sequence
  Synthetically generated peptide
  VARIANT (8)..(12): Xaa = Any Amino Acid
  misc_feature (15)..(15): Xaa can be any naturally occurring amino acid
CCEYCCNXPACXTGXCY

SEQ ID NO: 2860 - protein, 18 aa, Artificial Sequence
  Synthetically generated peptide
  VARIANT (8)..(12): Xaa = Any Amino Acid
  misc_feature (15)..(16): Xaa can be any naturally occurring amino acid
CCEYCCNXPACXTGXXCY

SEQ ID NO: 2861 - protein, 18 aa, Artificial Sequence
  Synthetically generated peptide
  VARIANT (8)..(12): Xaa = Any Amino Acid
  misc_feature (15)..(15): Xaa can be any naturally occurring amino acid
  misc_feature (17)..(17): Xaa can be any naturally occurring amino acid
CCEYCCNXPACXTGXCXY

SEQ ID NO: 2862 - protein, 17 aa, Artificial Sequence
  Synthetically generated peptide
  VARIANT (8)..(12): Xaa = Any Amino Acid
  misc_feature (16)..(16): Xaa can be any naturally occurring amino acid
CCEYCCNXPACXTGCXY

SEQ ID NO: 2863 - protein, 18 aa, Artificial Sequence
  Synthetically generated peptide
  VARIANT (8)..(12): Xaa = Any Amino Acid
  misc_feature (16)..(17): Xaa can be any naturally occurring amino acid
CCEYCCNXPACXTGCXXY

SEQ ID NO: 2864 - protein, 16 aa, Artificial Sequence
  Synthetically generated peptide
  VARIANT (8)..(13): Xaa = Any Amino Acid
CCEYCCNXPACTXGCY

SEQ ID NO: 2865 - protein, 17 aa, Artificial Sequence
  Synthetically generated peptide
  VARIANT (8)..(13): Xaa = Any Amino Acid
  misc_feature (14)..(14): Xaa can be any naturally occurring amino acid
CCEYCCNXPACTXXGCY

SEQ ID NO: 2866 - protein, 18 aa, Artificial Sequence
  Synthetically generated peptide
  VARIANT (8)..(13): Xaa = Any Amino Acid
  misc_feature (14)..(15): Xaa can be any naturally occurring amino acid
CCEYCCNXPACTXXXGCY

SEQ ID NO: 2867 - protein, 18 aa, Artificial Sequence
  Synthetically generated peptide
  VARIANT (8)..(13): Xaa = Any Amino Acid
  misc_feature (14)..(14): Xaa can be any naturally occurring amino acid
  misc_feature (16)..(16): Xaa can be any naturally occurring amino acid
CCEYCCNXPACTXXGXCY

SEQ ID NO: 2868 - protein, 18 aa, Artificial Sequence
  Synthetically generated peptide
  VARIANT (8)..(13): Xaa = Any Amino Acid
  misc_feature (14)..(14): Xaa can be any naturally occurring amino acid
  misc_feature (17)..(17): Xaa can be any naturally occurring amino acid
CCEYCCNXPACTXXGCXY

SEQ ID NO: 2869 - protein, 17 aa, Artificial Sequence
  Synthetically generated peptide
  VARIANT (8)..(13): Xaa = Any Amino Acid
  misc_feature (15)..(15): Xaa can be any naturally occurring amino acid
CCEYCCNXPACTXGXCY

SEQ ID NO: 2870 - protein, 18 aa, Artificial Sequence
  Synthetically generated peptide
  VARIANT (8)..(13): Xaa = Any Amino Acid
  misc_feature (15)..(16): Xaa can be any naturally occurring amino acid
CCEYCCNXPACTXGXXCY

SEQ ID NO: 2871 - protein, 18 aa, Artificial Sequence
  Synthetically generated peptide
  VARIANT (8)..(13): Xaa = Any Amino Acid
  misc_feature (15)..(15): Xaa can be any naturally occurring amino acid
  misc_feature (17)..(17): Xaa can be any naturally occurring amino acid
CCEYCCNXPACTXGXCXY

SEQ ID NO: 2872 - protein, 17 aa, Artificial Sequence
  Synthetically generated peptide
  VARIANT (8)..(13): Xaa = Any Amino Acid
  misc_feature (16)..(16): Xaa can be any naturally occurring amino acid
CCEYCCNXPACTXGCXY

SEQ ID NO: 2873 - protein, 18 aa, Artificial Sequence
  Synthetically generated peptide
  VARIANT (8)..(13): Xaa = Any Amino Acid
  misc_feature (16)..(17): Xaa can be any naturally occurring amino acid
CCEYCCNXPACTXGCXXY

SEQ ID NO: 2874 - protein, 16 aa, Artificial Sequence
  Synthetically generated peptide
  VARIANT (8)..(14): Xaa = Any Amino Acid
CCEYCCNXPACTGXCY

SEQ ID NO: 2875 - protein, 17 aa, Artificial Sequence
  Synthetically generated peptide
  VARIANT (8)..(14): Xaa = Any Amino Acid
  misc_feature (15)..(15): Xaa can be any naturally occurring amino acid
CCEYCCNXPACTGXXCY

SEQ ID NO: 2876 - protein, 18 aa, Artificial Sequence
  Synthetically generated peptide
  VARIANT (8)..(14): Xaa = Any Amino Acid
  misc_feature (15)..(16): Xaa can be any naturally occurring amino acid
CCEYCCNXPACTGXXXCY

SEQ ID NO: 2877 - protein, 18 aa, Artificial Sequence
  Synthetically generated peptide
  VARIANT (8)..(14): Xaa = Any Amino Acid
  misc_feature (15)..(15): Xaa can be any naturally occurring amino acid
  misc_feature (17)..(17): Xaa can be any naturally occurring amino acid
CCEYCCNXPACTGXXCXY

SEQ ID NO: 2878 - protein, 17 aa, Artificial Sequence
  Synthetically generated peptide
  VARIANT (8)..(14): Xaa = Any Amino Acid
  misc_feature (16)..(16): Xaa can be any naturally occurring amino acid
CCEYCCNXPACTGXCXY

SEQ ID NO: 2879 - protein, 18 aa, Artificial Sequence
  Synthetically generated peptide
  VARIANT (8)..(14): Xaa = Any Amino Acid
  misc_feature (16)..(17): Xaa can be any naturally occurring amino acid
CCEYCCNXPACTGXCXXY

SEQ ID NO: 2880 - protein, 16 aa, Artificial Sequence
  Synthetically generated peptide
  VARIANT (8)..(15): Xaa = Any Amino Acid
CCEYCCNXPACTGCXY

SEQ ID NO: 2881 - protein, 17 aa, Artificial Sequence
  Synthetically generated peptide
  VARIANT (8)..(15): Xaa = Any Amino Acid
  misc_feature (16)..(16): Xaa can be any naturally occurring amino acid
CCEYCCNXPACTGCXXY

SEQ ID NO: 2882 - protein, 18 aa, Artificial Sequence
  Synthetically generated peptide
  VARIANT (8)..(15): Xaa = Any Amino Acid
  misc_feature (16)..(17): Xaa can be any naturally occurring amino acid
CCEYCCNXPACTGCXXXY

SEQ ID NO: 2883 - protein, 15 aa, Artificial Sequence
  Synthetically generated peptide
  VARIANT (9)..(9): Xaa = Any Amino Acid
CCEYCCNPXACTGCY

SEQ ID NO: 2884 - protein, 16 aa, Artificial Sequence
  Synthetically generated peptide
  VARIANT (9)..(10): Xaa = Any Amino Acid
CCEYCCNPXXACTGCY

SEQ ID NO: 2885 - protein, 17 aa, Artificial Sequence
  Synthetically generated peptide
  VARIANT (9)..(10): Xaa = Any Amino Acid
  misc_feature (11)..(11): Xaa can be any naturally occurring amino acid
CCEYCCNPXXXACTGCY

SEQ ID NO: 2886 - protein, 18 aa, Artificial Sequence
  Synthetically generated peptide
  VARIANT (9)..(10): Xaa = Any Amino Acid
  misc_feature (11)..(12): Xaa can be any naturally occurring amino acid
CCEYCCNPXXXXACTGCY

SEQ ID NO: 2887 - protein, 18 aa, Artificial Sequence
  Synthetically generated peptide
  VARIANT (9)..(10): Xaa = Any Amino Acid
  misc_feature (11)..(11): Xaa can be any naturally occurring amino acid
  misc_feature (13)..(13): Xaa can be any naturally occurring amino acid
CCEYCCNPXXXAXCTGCY

SEQ ID NO: 2888 - protein, 18 aa, Artificial Sequence
  Synthetically generated peptide
  VARIANT (9)..(10): Xaa = Any Amino Acid
  misc_feature (11)..(11): Xaa can be any naturally occurring amino acid
  misc_feature (14)..(14): Xaa can be any naturally occurring amino acid
CCEYCCNPXXXACXTGCY

SEQ ID NO: 2889 - protein, 18 aa, Artificial Sequence
  Synthetically generated peptide
  VARIANT (9)..(10): Xaa = Any Amino Acid
  misc_feature (11)..(11): Xaa can be any naturally occurring amino acid
  misc_feature (15)..(15): Xaa can be any naturally occurring amino acid
CCEYCCNPXXXACTXGCY

SEQ ID NO: 2890 - protein, 18 aa, Artificial Sequence
  Synthetically generated peptide
  VARIANT (9)..(10): Xaa = Any Amino Acid
  misc_feature (11)..(11): Xaa can be any naturally occurring amino acid
  misc_feature (16)..(16): Xaa can be any naturally occurring amino acid
CCEYCCNPXXXACTGXCY

SEQ ID NO: 2891 - protein, 18 aa, Artificial Sequence
  Synthetically generated peptide
  VARIANT (9)..(10): Xaa = Any Amino Acid
  misc_feature (11)..(11): Xaa can be any naturally occurring amino acid
  misc_feature (17)..(17): Xaa can be any naturally occurring amino acid
CCEYCCNPXXXACTGCXY

SEQ ID NO: 2892 - protein, 17 aa, Artificial Sequence
  Synthetically generated peptide
  VARIANT (9)..(10): Xaa = Any Amino Acid
  misc_feature (12)..(12): Xaa can be any naturally occurring amino acid
CCEYCCNPXXAXCTGCY

SEQ ID NO: 2893 - protein, 18 aa, Artificial Sequence
  Synthetically generated peptide
  VARIANT (9)..(10): Xaa = Any Amino Acid
  misc_feature (12)..(13): Xaa can be any naturally occurring amino acid
CCEYCCNPXXAXXCTGCY

SEQ ID NO: 2894 - protein, 18 aa, Artificial Sequence
  Synthetically generated peptide
  VARIANT (9)..(10): Xaa = Any Amino Acid
  misc_feature (12)..(12): Xaa can be any naturally occurring amino acid
  misc_feature (14)..(14): Xaa can be any naturally occurring amino acid
CCEYCCNPXXAXCXTGCY

SEQ ID NO: 2895 - protein, 18 aa, Artificial Sequence
  Synthetically generated peptide
  VARIANT (9)..(10): Xaa = Any Amino Acid
  misc_feature (12)..(12): Xaa can be any naturally occurring amino acid
  misc_feature (15)..(15): Xaa can be any naturally occurring amino acid
CCEYCCNPXXAXCTXGCY

SEQ ID NO: 2896 - protein, 18 aa, Artificial Sequence
  Synthetically generated peptide
  VARIANT (9)..(10): Xaa = Any Amino Acid
  misc_feature (12)..(12): Xaa can be any naturally occurring amino acid
  misc_feature (16)..(16): Xaa can be any naturally occurring amino acid
CCEYCCNPXXAXCTGXCY

SEQ ID NO: 2897 - protein, 18 aa, Artificial Sequence
  Synthetically generated peptide
  VARIANT (9)..(10): Xaa = Any Amino Acid
  misc_feature (12)..(12): Xaa can be any naturally occurring amino acid
  misc_feature (17)..(17): Xaa can be any naturally occurring amino acid
CCEYCCNPXXAXCTGCXY

SEQ ID NO: 2898 - protein, 17 aa, Artificial Sequence
  Synthetically generated peptide
  VARIANT (9)..(10): Xaa = Any Amino Acid
  misc_feature (13)..(13): Xaa can be any naturally occurring amino acid
CCEYCCNPXXACXTGCY

SEQ ID NO: 2899 - protein, 18 aa, Artificial Sequence
  Synthetically generated peptide
  VARIANT (9)..(10): Xaa = Any Amino Acid
  misc_feature (13)..(14): Xaa can be any naturally occurring amino acid
CCEYCCNPXXACXXTGCY

SEQ ID NO: 2900 - protein, 18 aa, Artificial Sequence
  Synthetically generated peptide
  VARIANT (9)..(10): Xaa = Any Amino Acid
  misc_feature (13)..(13): Xaa can be any naturally occurring amino acid
  misc_feature (15)..(15): Xaa can be any naturally occurring amino acid
CCEYCCNPXXACXTXGCY

SEQ ID NO: 2901 - protein, 18 aa, Artificial Sequence
  Synthetically generated peptide
  VARIANT (9)..(10): Xaa = Any Amino Acid
  misc_feature (13)..(13): Xaa can be any naturally occurring amino acid
  misc_feature (16)..(16): Xaa can be any naturally occurring amino acid
CCEYCCNPXXACXTGXCY

SEQ ID NO: 2902 - protein, 18 aa, Artificial Sequence
  Synthetically generated peptide
  VARIANT (9)..(10): Xaa = Any Amino Acid
  misc_feature (13)..(13): Xaa can be any naturally occurring amino acid
  misc_feature (17)..(17): Xaa can be any naturally occurring amino acid
CCEYCCNPXXACXTGCXY

SEQ ID NO: 2903 - protein, 17 aa, Artificial Sequence
  Synthetically generated peptide
  VARIANT (9)..(10): Xaa = Any Amino Acid
  misc_feature (14)..(14): Xaa can be any naturally occurring amino acid
CCEYCCNPXXACTXGCY

SEQ ID NO: 2904 - protein, 18 aa, Artificial Sequence
  Synthetically generated peptide
  VARIANT (9)..(10): Xaa = Any Amino Acid
  misc_feature (14)..(15): Xaa can be any naturally occurring amino acid
CCEYCCNPXXACTXXGCY

SEQ ID NO: 2905 - protein, 18 aa, Artificial Sequence
  Synthetically generated peptide
  VARIANT (9)..(10): Xaa = Any Amino Acid
  misc_feature (14)..(14): Xaa can be any naturally occurring amino acid
  misc_feature (16)..(16): Xaa can be any naturally occurring amino acid
CCEYCCNPXXACTXGXCY

SEQ ID NO: 2906 - protein, 18 aa, Artificial Sequence
  Synthetically generated peptide
  VARIANT (9)..(10): Xaa = Any Amino Acid
  misc_feature (14)..(14): Xaa can be any naturally occurring amino acid
  misc_feature (17)..(17): Xaa can be any naturally occurring amino acid
CCEYCCNPXXACTXGCXY

SEQ ID NO: 2907 - protein, 17 aa, Artificial Sequence
  Synthetically generated peptide
  VARIANT (9)..(10): Xaa = Any Amino Acid
  misc_feature (15)..(15): Xaa can be any naturally occurring amino acid
CCEYCCNPXXACTGXCY

SEQ ID NO: 2908 - protein, 18 aa, Artificial Sequence
  Synthetically generated peptide
  VARIANT (9)..(10): Xaa = Any Amino Acid
  misc_feature (15)..(16): Xaa can be any naturally occurring amino acid
CCEYCCNPXXACTGXXCY

SEQ ID NO: 2909 - protein, 18 aa, Artificial Sequence
  Synthetically generated peptide
  VARIANT (9)..(10): Xaa = Any Amino Acid
  misc_feature (15)..(15): Xaa can be any naturally occurring amino acid
  misc_feature (17)..(17): Xaa can be any naturally occurring amino acid
CCEYCCNPXXACTGXCXY

SEQ ID NO: 2910 - protein, 17 aa, Artificial Sequence
  Synthetically generated peptide
  VARIANT (9)..(10): Xaa = Any Amino Acid
  misc_feature (16)..(16): Xaa can be any naturally occurring amino acid
CCEYCCNPXXACTGCXY

SEQ ID NO: 2911 - protein, 18 aa, Artificial Sequence
  Synthetically generated peptide
  VARIANT (9)..(10): Xaa = Any Amino Acid
  misc_feature (16)..(17): Xaa can be any naturally occurring amino acid
CCEYCCNPXXACTGCXXY

SEQ ID NO: 2912 - protein, 16 aa, Artificial Sequence
  Synthetically generated peptide
  VARIANT (1)..(16): Xaa = Any Amino Acid
  VARIANT (9)..(11): Xaa = Any Amino Acid
CCEYCCNPXAXCTGCY

SEQ ID NO: 2913 - protein, 17 aa, Artificial Sequence
  Synthetically generated peptide
  VARIANT (9)..(11): Xaa = Any Amino Acid
  misc_feature (12)..(12): Xaa can be any naturally occurring amino acid
CCEYCCNPXAXXCTGCY

SEQ ID NO: 2914 - protein, 18 aa, Artificial Sequence
  Synthetically generated peptide
  VARIANT (9)..(11): Xaa = Any Amino Acid
  misc_feature (12)..(13): Xaa can be any naturally occurring amino acid
CCEYCCNPXAXXXCTGCY

SEQ ID NO: 2915 - protein, 18 aa, Artificial Sequence
  Synthetically generated peptide
  VARIANT (9)..(11): Xaa = Any Amino Acid
  misc_feature (12)..(12): Xaa can be any naturally occurring amino acid
  misc_feature (14)..(14): Xaa can be any naturally occurring amino acid
CCEYCCNPXAXXCXTGCY

SEQ ID NO: 2916 - protein, 18 aa, Artificial Sequence
  Synthetically generated peptide
  VARIANT (9)..(11): Xaa = Any Amino Acid
  misc_feature (12)..(12): Xaa can be any naturally occurring amino acid
  misc_feature (15)..(15): Xaa can be any naturally occurring amino acid
CCEYCCNPXAXXCTXGCY

SEQ ID NO: 2917 - protein, 18 aa, Artificial Sequence
  Synthetically generated peptide
  VARIANT (9)..(11): Xaa = Any Amino Acid
  misc_feature (12)..(12): Xaa can be any naturally occurring amino acid
  misc_feature (16)..(16): Xaa can be any naturally occurring amino acid
CCEYCCNPXAXXCTGXCY

SEQ ID NO: 2918 - protein, 18 aa, Artificial Sequence
  Synthetically generated peptide
  VARIANT (9)..(11): Xaa = Any Amino Acid
  misc_feature (12)..(12): Xaa can be any naturally occurring amino acid
  misc_feature (17)..(17): Xaa can be any naturally occurring amino acid
CCEYCCNPXAXXCTGCXY

SEQ ID NO: 2919 - protein, 17 aa, Artificial Sequence
  Synthetically generated peptide
  VARIANT (9)..(11): Xaa = Any Amino Acid
  misc_feature (13)..(13): Xaa can be any naturally occurring amino acid
CCEYCCNPXAXCXTGCY

SEQ ID NO: 2920 - protein, 18 aa, Artificial Sequence
  Synthetically generated peptide
  VARIANT (9)..(11): Xaa = Any Amino Acid
  misc_feature (13)..(14): Xaa can be any naturally occurring amino acid
CCEYCCNPXAXCXXTGCY

SEQ ID NO: 2921 - protein, 18 aa, Artificial Sequence
  Synthetically generated peptide
  VARIANT (9)..(11): Xaa = Any Amino Acid
  misc_feature (13)..(13): Xaa can be any naturally occurring amino acid
  misc_feature (15)..(15): Xaa can be any naturally occurring amino acid
CCEYCCNPXAXCXTXGCY

SEQ ID NO: 2922 - protein, 18 aa, Artificial Sequence
  Synthetically generated peptide
  VARIANT (9)..(11): Xaa = Any Amino Acid
  misc_feature (13)..(13): Xaa can be any naturally occurring amino acid
  misc_feature (16)..(16): Xaa can be any naturally occurring amino acid
CCEYCCNPXAXCXTGXCY

SEQ ID NO: 2923 - protein, 18 aa, Artificial Sequence
  Synthetically generated peptide
  VARIANT (9)..(11): Xaa = Any Amino Acid
  misc_feature (13)..(13): Xaa can be any naturally occurring amino acid
  misc_feature (17)..(17): Xaa can be any naturally occurring amino acid
CCEYCCNPXAXCXTGCXY

SEQ ID NO: 2924 - protein, 17 aa, Artificial Sequence
  Synthetically generated peptide
  VARIANT (9)..(11): Xaa = Any Amino Acid
  misc_feature (14)..(14): Xaa can be any naturally occurring amino acid
CCEYCCNPXAXCTXGCY

SEQ ID NO: 2925 - protein, 18 aa, Artificial Sequence
  Synthetically generated peptide
  VARIANT (9)..(11): Xaa = Any Amino Acid
  misc_feature (14)..(15): Xaa can be any naturally occurring amino acid
CCEYCCNPXAXCTXXGCY

SEQ ID NO: 2926 - protein, 18 aa, Artificial Sequence
  Synthetically generated peptide
  VARIANT (9)..(11): Xaa = Any Amino Acid
  misc_feature (14)..(14): Xaa can be any naturally occurring amino acid
  misc_feature (16)..(16): Xaa can be any naturally occurring amino acid
CCEYCCNPXAXCTXGXCY

SEQ ID NO: 2927 - protein, 18 aa, Artificial Sequence
  Synthetically generated peptide
  VARIANT (9)..(11): Xaa = Any Amino Acid
  misc_feature (14)..(14): Xaa can be any naturally occurring amino acid
  misc_feature (17)..(17): Xaa can be any naturally occurring amino acid
CCEYCCNPXAXCTXGCXY

SEQ ID NO: 2928 - protein, 17 aa, Artificial Sequence
  Synthetically generated peptide
  VARIANT (9)..(11): Xaa = Any Amino Acid
  misc_feature (15)..(15): Xaa can be any naturally occurring amino acid
CCEYCCNPXAXCTGXCY

SEQ ID NO: 2929 - protein, 18 aa, Artificial Sequence
  Synthetically generated peptide
  VARIANT (9)..(11): Xaa = Any Amino Acid
  misc_feature (15)..(16): Xaa can be any naturally occurring amino acid
CCEYCCNPXAXCTGXXCY

SEQ ID NO: 2930 - protein, 18 aa, Artificial Sequence
  Synthetically generated peptide
  VARIANT (9)..(11): Xaa = Any Amino Acid
  misc_feature (15)..(15): Xaa can be any naturally occurring amino acid
  misc_feature (17)..(17): Xaa can be any naturally occurring amino acid
CCEYCCNPXAXCTGXCXY

SEQ ID NO: 2931 - protein, 17 aa, Artificial Sequence
  Synthetically generated peptide
  VARIANT (9)..(11): Xaa = Any Amino Acid
  misc_feature (16)..(16): Xaa can be any naturally occurring amino acid
CCEYCCNPXAXCTGCXY

SEQ ID NO: 2932 - protein, 18 aa, Artificial Sequence
  Synthetically generated peptide
  VARIANT (9)..(11): Xaa = Any Amino Acid
  misc_feature (16)..(17): Xaa can be any naturally occurring amino acid
CCEYCCNPXAXCTGCXXY

SEQ ID NO: 2933 - protein, 16 aa, Artificial Sequence
  Synthetically generated peptide
  VARIANT (9)..(12): Xaa = Any Amino Acid
CCEYCCNPXACXTGCY

SEQ ID NO: 2934 - protein, 17 aa, Artificial Sequence
  Synthetically generated peptide
  VARIANT (9)..(12): Xaa = Any Amino Acid
  misc_feature (13)..(13): Xaa can be any naturally occurring amino acid
CCEYCCNPXACXXTGCY

SEQ ID NO: 2935 - protein, 18 aa, Artificial Sequence
  Synthetically generated peptide
  VARIANT (9)..(12): Xaa = Any Amino Acid
  misc_feature (13)..(14): Xaa can be any naturally occurring amino acid
CCEYCCNPXACXXXTGCY

SEQ ID NO: 2936 - protein, 18 aa, Artificial Sequence
  Synthetically generated peptide
  VARIANT (9)..(12): Xaa = Any Amino Acid
  misc_feature (13)..(13): Xaa can be any naturally occurring amino acid
  misc_feature (15)..(15): Xaa can be any naturally occurring amino acid
CCEYCCNPXACXXTXGCY

SEQ ID NO: 2937 - protein, 18 aa, Artificial Sequence
  Synthetically generated peptide
  VARIANT (9)..(12): Xaa = Any Amino Acid
  misc_feature (13)..(13): Xaa can be any naturally occurring amino acid
  misc_feature (16)..(16): Xaa can be any naturally occurring amino acid
CCEYCCNPXACXXTGXCY

SEQ ID NO: 2938 - protein, 18 aa, Artificial Sequence
  Synthetically generated peptide
  VARIANT (9)..(12): Xaa = Any Amino Acid
  misc_feature (13)..(13): Xaa can be any naturally occurring amino acid
  misc_feature (17)..(17): Xaa can be any naturally occurring amino acid
CCEYCCNPXACXXTGCXY

SEQ ID NO: 2939 - protein, 17 aa, Artificial Sequence
  Synthetically generated peptide
  VARIANT (9)..(12): Xaa = Any Amino Acid
  misc_feature (14)..(14): Xaa can be any naturally occurring amino acid
CCEYCCNPXACXTXGCY

SEQ ID NO: 2940 - protein, 18 aa, Artificial Sequence
  Synthetically generated peptide
  VARIANT (9)..(12): Xaa = Any Amino Acid
  misc_feature (14)..(15): Xaa can be any naturally occurring amino acid
CCEYCCNPXACXTXXGCY

SEQ ID NO: 2941 - protein, 18 aa, Artificial Sequence
  Synthetically generated peptide
  VARIANT (9)..(12): Xaa = Any Amino Acid
  misc_feature (14)..(14): Xaa can be any naturally occurring amino acid
  misc_feature (16)..(16): Xaa can be any naturally occurring amino acid
CCEYCCNPXACXTXGXCY

SEQ ID NO: 2942 - protein, 18 aa, Artificial Sequence
  Synthetically generated peptide
  VARIANT (9)..(12): Xaa = Any Amino Acid
  misc_feature (14)..(14): Xaa can be any naturally occurring amino acid
  misc_feature (17)..(17): Xaa can be any naturally occurring amino acid
CCEYCCNPXACXTXGCXY

SEQ ID NO: 2943 - protein, 17 aa, Artificial Sequence
  Synthetically generated peptide
  VARIANT (9)..(12): Xaa = Any Amino Acid
  misc_feature (15)..(15): Xaa can be any naturally occurring amino acid
CCEYCCNPXACXTGXCY

SEQ ID NO: 2944 - protein, 18 aa, Artificial Sequence
  Synthetically generated peptide
  VARIANT (9)..(12): Xaa = Any Amino Acid
  misc_feature (15)..(16): Xaa can be any naturally occurring amino acid
CCEYCCNPXACXTGXXCY

SEQ ID NO: 2945 - protein, 18 aa, Artificial Sequence
  Synthetically generated peptide
  VARIANT (9)..(12): Xaa = Any Amino Acid
  misc_feature (15)..(15): Xaa can be any naturally occurring amino acid
  misc_feature (17)..(17): Xaa can be any naturally occurring amino acid
CCEYCCNPXACXTGXCXY

SEQ ID NO: 2946 - protein, 17 aa, Artificial Sequence
  Synthetically generated peptide
  VARIANT (9)..(12): Xaa = Any Amino Acid
  misc_feature (16)..(16): Xaa can be any naturally occurring amino acid
CCEYCCNPXACXTGCXY

SEQ ID NO: 2947 - protein, 18 aa, Artificial Sequence
  Synthetically generated peptide
  VARIANT (9)..(12): Xaa = Any Amino Acid
  misc_feature (16)..(17): Xaa can be any naturally occurring amino acid
CCEYCCNPXACXTGCXXY

SEQ ID NO: 2948 - protein, 16 aa, Artificial Sequence
  Synthetically generated peptide
  VARIANT (9)..(13): Xaa = Any Amino Acid
CCEYCCNPXACTXGCY

SEQ ID NO: 2949 - protein, 17 aa, Artificial Sequence
  Synthetically generated peptide
  VARIANT (9)..(13): Xaa = Any Amino Acid
  misc_feature (14)..(14): Xaa can be any naturally occurring amino acid
CCEYCCNPXACTXXGCY

SEQ ID NO: 2950 - protein, 18 aa, Artificial Sequence
  Synthetically generated peptide
  VARIANT (9)..(13): Xaa = Any Amino Acid
  misc_feature (14)..(15): Xaa can be any naturally occurring amino acid
CCEYCCNPXACTXXXGCY

SEQ ID NO: 2951 - protein, 18 aa, Artificial Sequence
  Synthetically generated peptide
  VARIANT (9)..(13): Xaa = Any Amino Acid
  misc_feature (14)..(14): Xaa can be any naturally occurring amino acid
  misc_feature (16)..(16): Xaa can be any naturally occurring amino acid
CCEYCCNPXACTXXGXCY

SEQ ID NO: 2952 - protein, 18 aa, Artificial Sequence
  Synthetically generated peptide
  VARIANT (9)..(13): Xaa = Any Amino Acid
  misc_feature (14)..(14): Xaa can be any naturally occurring amino acid
  misc_feature (17)..(17): Xaa can be any naturally occurring amino acid
CCEYCCNPXACTXXGCXY

SEQ ID NO: 2953 - protein, 17 aa, Artificial Sequence
  Synthetically generated peptide
  VARIANT (9)..(13): Xaa = Any Amino Acid
  misc_feature (15)..(15): Xaa can be any naturally occurring amino acid
CCEYCCNPXACTXGXCY

SEQ ID NO: 2954 - protein, 18 aa, Artificial Sequence
  Synthetically generated peptide
  VARIANT (9)..(13): Xaa = Any Amino Acid
  misc_feature (15)..(16): Xaa can be any naturally occurring amino acid
CCEYCCNPXACTXGXXCY

SEQ ID NO: 2955 - protein, 18 aa, Artificial Sequence
  Synthetically generated peptide
  VARIANT (9)..(13): Xaa = Any Amino Acid
  misc_feature (15)..(15): Xaa can be any naturally occurring amino acid
  misc_feature (17)..(17): Xaa can be any naturally occurring amino acid
CCEYCCNPXACTXGXCXY

SEQ ID NO: 2956 - protein, 17 aa, Artificial Sequence
  Synthetically generated peptide
  VARIANT (9)..(13): Xaa = Any Amino Acid
  misc_feature (16)..(16): Xaa can be any naturally occurring amino acid
CCEYCCNPXACTXGCXY

SEQ ID NO: 2957 - protein, 18 aa, Artificial Sequence
  Synthetically generated peptide
  VARIANT (9)..(13): Xaa = Any Amino Acid
  misc_feature (16)..(17): Xaa can be any naturally occurring amino acid
CCEYCCNPXACTXGCXXY

SEQ ID NO: 2958 - protein, 16 aa, Artificial Sequence
  Synthetically generated peptide
  VARIANT (1)..(16): Xaa = Any Amino Acid
  VARIANT (9)..(14): Xaa = Any Amino Acid
CCEYCCNPXACTGXCY

SEQ ID NO: 2959 - protein, 17 aa, Artificial Sequence
  Synthetically generated peptide
  VARIANT (9)..(14): Xaa = Any Amino Acid
  misc_feature (15)..(15): Xaa can be any naturally occurring amino acid
CCEYCCNPXACTGXXCY

SEQ ID NO: 2960 - protein, 18 aa, Artificial Sequence
  Synthetically generated peptide
  VARIANT (9)..(14): Xaa = Any Amino Acid
  misc_feature (15)..(16): Xaa can be any naturally occurring amino acid
CCEYCCNPXACTGXXXCY

SEQ ID NO: 2961 - protein, 18 aa, Artificial Sequence
  Synthetically generated peptide
  VARIANT (9)..(14): Xaa = Any Amino Acid
  misc_feature (15)..(15): Xaa can be any naturally occurring amino acid
  misc_feature (17)..(17): Xaa can be any naturally occurring amino acid
CCEYCCNPXACTGXXCXY

SEQ ID NO: 2962 - protein, 17 aa, Artificial Sequence
  Synthetically generated peptide
  VARIANT (9)..(14): Xaa = Any Amino Acid
  misc_feature (16)..(16): Xaa can be any naturally occurring amino acid
CCEYCCNPXACTGXCXY

SEQ ID NO: 2963 - protein, 18 aa, Artificial Sequence
  Synthetically generated peptide
  VARIANT (9)..(14): Xaa = Any Amino Acid
  misc_feature (16)..(17): Xaa can be any naturally occurring amino acid
CCEYCCNPXACTGXCXXY

SEQ ID NO: 2964 - protein, 16 aa, Artificial Sequence
  Synthetically generated peptide
  VARIANT (9)..(15): Xaa = Any Amino Acid
CCEYCCNPXACTGCXY

SEQ ID NO: 2965 - protein, 17 aa, Artificial Sequence
  Synthetically generated peptide
  VARIANT (9)..(15): Xaa = Any Amino Acid
  misc_feature (16)..(16): Xaa can be any naturally occurring amino acid
CCEYCCNPXACTGCXXY

SEQ ID NO: 2966 - protein, 18 aa, Artificial Sequence
  Synthetically generated peptide
  VARIANT (9)..(15): Xaa = Any Amino Acid
  misc_feature (16)..(17): Xaa can be any naturally occurring amino acid
CCEYCCNPXACTGCXXXY

SEQ ID NO: 2967 - protein, 15 aa, Artificial Sequence
  Synthetically generated peptide
  VARIANT (10)..(10): Xaa = Any Amino Acid
CCEYCCNPAXCTGCY

SEQ ID NO: 2968 - protein, 16 aa, Artificial Sequence
  Synthetically generated peptide
  VARIANT (10)..(11): Xaa = Any Amino Acid
CCEYCCNPAXXCTGCY

SEQ ID NO: 2969 - protein, 17 aa, Artificial Sequence
  Synthetically generated peptide
  VARIANT (10)..(11): Xaa = Any Amino Acid
  misc_feature (12)..(12): Xaa can be any naturally occurring amino acid
CCEYCCNPAXXXCTGCY

SEQ ID NO: 2970 - protein, 18 aa, Artificial Sequence
  Synthetically generated peptide
  VARIANT (10)..(11): Xaa = Any Amino Acid
  misc_feature (12)..(13): Xaa can be any naturally occurring amino acid
CCEYCCNPAXXXXCTGCY

SEQ ID NO: 2971 - protein, 18 aa, Artificial Sequence
  Synthetically generated peptide
  VARIANT (10)..(11): Xaa = Any Amino Acid
  misc_feature (12)..(12): Xaa can be any naturally occurring amino acid
  misc_feature (14)..(14): Xaa can be any naturally occurring amino acid
CCEYCCNPAXXXCXTGCY

SEQ ID NO: 2972 - protein, 18 aa, Artificial Sequence
  Synthetically generated peptide
  VARIANT (10)..(11): Xaa = Any Amino Acid
  misc_feature (12)..(12): Xaa can be any naturally occurring amino acid
  misc_feature (15)..(15): Xaa can be any naturally occurring amino acid
CCEYCCNPAXXXCTXGCY

SEQ ID NO: 2973 - protein, 18 aa, Artificial Sequence
  Synthetically generated peptide
  VARIANT (10)..(11): Xaa = Any Amino Acid
  misc_feature (12)..(12): Xaa can be any naturally occurring amino acid
  misc_feature (16)..(16): Xaa can be any naturally occurring amino acid
CCEYCCNPAXXXCTGXCY

SEQ ID NO: 2974 - protein, 18 aa, Artificial Sequence
  Synthetically generated peptide
  VARIANT (10)..(11): Xaa = Any Amino Acid
  misc_feature (12)..(12): Xaa can be any naturally occurring amino acid
  misc_feature (17)..(17): Xaa can be any naturally occurring amino acid
CCEYCCNPAXXXCTGCXY

SEQ ID NO: 2975 - protein, 17 aa, Artificial Sequence
  Synthetically generated peptide
  VARIANT (10)..(11): Xaa = Any Amino Acid
  misc_feature (13)..(13): Xaa can be any naturally occurring amino acid
CCEYCCNPAXXCXTGCY

SEQ ID NO: 2976 - protein, 18 aa, Artificial Sequence
  Synthetically generated peptide
  VARIANT (10)..(11): Xaa = Any Amino Acid
  misc_feature (13)..(14): Xaa can be any naturally occurring amino acid
CCEYCCNPAXXCXXTGCY

SEQ ID NO: 2977 - protein, 18 aa, Artificial Sequence
  Synthetically generated peptide
  VARIANT (10)..(11): Xaa = Any Amino Acid
  misc_feature (13)..(13): Xaa can be any naturally occurring amino acid
  misc_feature (15)..(15): Xaa can be any naturally occurring amino acid
CCEYCCNPAXXCXTXGCY

SEQ ID NO: 2978 - protein, 18 aa, Artificial Sequence
  Synthetically generated peptide
  VARIANT (10)..(11): Xaa = Any Amino Acid
  misc_feature (13)..(13): Xaa can be any naturally occurring amino acid
  misc_feature (16)..(16): Xaa can be any naturally occurring amino acid
CCEYCCNPAXXCXTGXCY

SEQ ID NO: 2979 - protein, 18 aa, Artificial Sequence
  Synthetically generated peptide
  VARIANT (10)..(11): Xaa = Any Amino Acid
  misc_feature (13)..(13): Xaa can be any naturally occurring amino acid
  misc_feature (17)..(17): Xaa can be any naturally occurring amino acid
CCEYCCNPAXXCXTGCXY

SEQ ID NO: 2980 - protein, 17 aa, Artificial Sequence
  Synthetically generated peptide
  VARIANT (10)..(11): Xaa = Any Amino Acid
  misc_feature (14)..(14): Xaa can be any naturally occurring amino acid
CCEYCCNPAXXCTXGCY

SEQ ID NO: 2981 - protein, 18 aa, Artificial Sequence
  Synthetically generated peptide
  VARIANT (10)..(11): Xaa = Any Amino Acid
  misc_feature (14)..(15): Xaa can be any naturally occurring amino acid
CCEYCCNPAXXCTXXGCY

SEQ ID NO: 2982 - protein, 18 aa, Artificial Sequence
  Synthetically generated peptide
  VARIANT (10)..(11): Xaa = Any Amino Acid
  misc_feature (14)..(14): Xaa can be any naturally occurring amino acid
  misc_feature (16)..(16): Xaa can be any naturally occurring amino acid
CCEYCCNPAXXCTXGXCY

SEQ ID NO: 2983 - protein, 18 aa, Artificial Sequence
  Synthetically generated peptide
  VARIANT (10)..(11): Xaa = Any Amino Acid
  misc_feature (14)..(14): Xaa can be any naturally occurring amino acid
  misc_feature (17)..(17): Xaa can be any naturally occurring amino acid
CCEYCCNPAXXCTXGCXY

SEQ ID NO: 2984 - protein, 17 aa, Artificial Sequence
  Synthetically generated peptide
  VARIANT (10)..(11): Xaa = Any Amino Acid
  misc_feature (15)..(15): Xaa can be any naturally occurring amino acid
CCEYCCNPAXXCTGXCY

SEQ ID NO: 2985 - protein, 18 aa, Artificial Sequence
  Synthetically generated peptide
  VARIANT (10)..(11): Xaa = Any Amino Acid
  misc_feature (15)..(16): Xaa can be any naturally occurring amino acid
CCEYCCNPAXXCTGXXCY

SEQ ID NO: 2986 - protein, 18 aa, Artificial Sequence
  Synthetically generated peptide
  VARIANT (10)..(11): Xaa = Any Amino Acid
  misc_feature (15)..(15): Xaa can be any naturally occurring amino acid
  misc_feature (17)..(17): Xaa can be any naturally occurring amino acid
CCEYCCNPAXXCTGXCXY

SEQ ID NO: 2987 - protein, 17 aa, Artificial Sequence
  Synthetically generated peptide
  VARIANT (10)..(11): Xaa = Any Amino Acid
  misc_feature (16)..(16): Xaa can be any naturally occurring amino acid
CCEYCCNPAXXCTGCXY

SEQ ID NO: 2988 - protein, 18 aa, Artificial Sequence
  Synthetically generated peptide
  VARIANT (10)..(11): Xaa = Any Amino Acid
  misc_feature (16)..(17): Xaa can be any naturally occurring amino acid
CCEYCCNPAXXCTGCXXY

SEQ ID NO: 2989 - protein, 16 aa, Artificial Sequence
  Synthetically generated peptide
  VARIANT (10)..(12): Xaa = Any Amino Acid
CCEYCCNPAXCXTGCY

SEQ ID NO: 2990 - protein, 17 aa, Artificial Sequence
  Synthetically generated peptide
  VARIANT (10)..(12): Xaa = Any Amino Acid
  misc_feature (13)..(13): Xaa can be any naturally occurring amino acid
CCEYCCNPAXCXXTGCY

SEQ ID NO: 2991 - protein, 18 aa, Artificial Sequence
  Synthetically generated peptide
  VARIANT (10)..(12): Xaa = Any Amino Acid
  misc_feature (13)..(14): Xaa can be any naturally occurring amino acid
CCEYCCNPAXCXXXTGCY

SEQ ID NO: 2992 - protein, 18 aa, Artificial Sequence
  Synthetically generated peptide
  VARIANT (10)..(12): Xaa = Any Amino Acid
  misc_feature (13)..(13): Xaa can be any naturally occurring amino acid
  misc_feature (15)..(15): Xaa can be any naturally occurring amino acid
CCEYCCNPAXCXXTXGCY

SEQ ID NO: 2993 - protein, 18 aa, Artificial Sequence
  Synthetically generated peptide
  VARIANT (10)..(12): Xaa = Any Amino Acid
  misc_feature (13)..(13): Xaa can be any naturally occurring amino acid
  misc_feature (16)..(16): Xaa can be any naturally occurring amino acid
CCEYCCNPAXCXXTGXCY

SEQ ID NO: 2994 - protein, 18 aa, Artificial Sequence
  Synthetically generated peptide
  VARIANT (10)..(12): Xaa = Any Amino Acid
  misc_feature (13)..(13): Xaa can be any naturally occurring amino acid
  misc_feature (17)..(17): Xaa can be any naturally occurring amino acid
CCEYCCNPAXCXXTGCXY

SEQ ID NO: 2995 - protein, 17 aa, Artificial Sequence
  Synthetically generated peptide
  VARIANT (10)..(12): Xaa = Any Amino Acid
  misc_feature (14)..(14): Xaa can be any naturally occurring amino acid
CCEYCCNPAXCXTXGCY

SEQ ID NO: 2996 - protein, 18 aa, Artificial Sequence
  Synthetically generated peptide
  VARIANT (10)..(12): Xaa = Any Amino Acid
  misc_feature (14)..(15): Xaa can be any naturally occurring amino acid
CCEYCCNPAXCXTXXGCY

SEQ ID NO: 2997 - protein, 18 aa, Artificial Sequence
  Synthetically generated peptide
  VARIANT (10)..(12): Xaa = Any Amino Acid
  misc_feature (14)..(14): Xaa can be any naturally occurring amino acid
  misc_feature (16)..(16): Xaa can be any naturally occurring amino acid
CCEYCCNPAXCXTXGXCY

SEQ ID NO: 2998 - protein, 18 aa, Artificial Sequence
  Synthetically generated peptide
  VARIANT (10)..(12): Xaa = Any Amino Acid
  misc_feature (14)..(14): Xaa can be any naturally occurring amino acid
  misc_feature (17)..(17): Xaa can be any naturally occurring amino acid
CCEYCCNPAXCXTXGCXY

SEQ ID NO: 2999 - protein, 17 aa, Artificial Sequence
  Synthetically generated peptide
  VARIANT (10)..(12): Xaa = Any Amino Acid
  misc_feature (15)..(15): Xaa can be any naturally occurring amino acid
CCEYCCNPAXCXTGXCY

SEQ ID NO: 3000 - protein, 18 aa, Artificial Sequence
  Synthetically generated peptide
  VARIANT (10)..(12): Xaa = Any Amino Acid
  misc_feature (15)..(16): Xaa can be any naturally occurring amino acid
CCEYCCNPAXCXTGXXCY

SEQ ID NO: 3001 - protein, 18 aa, Artificial Sequence
  Synthetically generated peptide
  VARIANT (10)..(12): Xaa = Any Amino Acid
  misc_feature (15)..(15): Xaa can be any naturally occurring amino acid
  misc_feature (17)..(17): Xaa can be any naturally occurring amino acid
CCEYCCNPAXCXTGXCXY

SEQ ID NO: 3002 - protein, 17 aa, Artificial Sequence
  Synthetically generated peptide
  VARIANT (10)..(12): Xaa = Any Amino Acid
  misc_feature (16)..(16): Xaa can be any naturally occurring amino acid
CCEYCCNPAXCXTGCXY

SEQ ID NO: 3003 - protein, 18 aa, Artificial Sequence
  Synthetically generated peptide
  VARIANT (10)..(12): Xaa = Any Amino Acid
  misc_feature (16)..(17): Xaa can be any naturally occurring amino acid
CCEYCCNPAXCXTGCXXY

SEQ ID NO: 3004 - protein, 16 aa, Artificial Sequence
  Synthetically generated peptide
  VARIANT (10)..(13): Xaa = Any Amino Acid
CCEYCCNPAXCTXGCY

SEQ ID NO: 3005 - protein, 17 aa, Artificial Sequence
  Synthetically generated peptide
  VARIANT (10)..(13): Xaa = Any Amino Acid
  misc_feature (14)..(14): Xaa can be any naturally occurring amino acid
CCEYCCNPAXCTXXGCY

SEQ ID NO: 3006 - protein, 18 aa, Artificial Sequence
  Synthetically generated peptide
  VARIANT (10)..(13): Xaa = Any Amino Acid
  misc_feature (14)..(15): Xaa can be any naturally occurring amino acid
CCEYCCNPAXCTXXXGCY

SEQ ID NO: 3007 - protein, 18 aa, Artificial Sequence
  Synthetically generated peptide
  VARIANT (10)..(13): Xaa = Any Amino Acid
  misc_feature (14)..(14): Xaa can be any naturally occurring amino acid
  misc_feature (16)..(16): Xaa can be any naturally occurring amino acid
CCEYCCNPAXCTXXGXCY

SEQ ID NO: 3008 - protein, 18 aa, Artificial Sequence
  Synthetically generated peptide
  VARIANT (10)..(13): Xaa = Any Amino Acid
  misc_feature (14)..(14): Xaa can be any naturally occurring amino acid
  misc_feature (17)..(17): Xaa can be any naturally occurring amino acid
CCEYCCNPAXCTXXGCXY

SEQ ID NO: 3009 - protein, 17 aa, Artificial Sequence
  Synthetically generated peptide
  VARIANT (10)..(13): Xaa = Any Amino Acid
  misc_feature (15)..(15): Xaa can be any naturally occurring amino acid
CCEYCCNPAXCTXGXCY

SEQ ID NO: 3010 - protein, 18 aa, Artificial Sequence
  Synthetically generated peptide
  VARIANT (10)..(13): Xaa = Any Amino Acid
  misc_feature (15)..(16): Xaa can be any naturally occurring amino acid
CCEYCCNPAXCTXGXXCY

SEQ ID NO: 3011 - protein, 18 aa, Artificial Sequence
  Synthetically generated peptide
  VARIANT (10)..(13): Xaa = Any Amino Acid
  misc_feature (15)..(15): Xaa can be any naturally occurring amino acid
  misc_feature (17)..(17): Xaa can be any naturally occurring amino acid
CCEYCCNPAXCTXGXCXY

SEQ ID NO: 3012 - protein, 17 aa, Artificial Sequence
  Synthetically generated peptide
  VARIANT (10)..(13): Xaa = Any Amino Acid
  misc_feature (16)..(16): Xaa can be any naturally occurring amino acid
CCEYCCNPAXCTXGCXY

SEQ ID NO: 3013 - protein, 18 aa, Artificial Sequence
  Synthetically generated peptide
  VARIANT (10)..(13): Xaa = Any Amino Acid
  misc_feature (16)..(17): Xaa can be any naturally occurring amino acid
CCEYCCNPAXCTXGCXXY

SEQ ID NO: 3014 - protein, 16 aa, Artificial Sequence
  Synthetically generated peptide
  VARIANT (10)..(14): Xaa = Any Amino Acid
CCEYCCNPAXCTGXCY

SEQ ID NO: 3015 - protein, 17 aa, Artificial Sequence
  Synthetically generated peptide
  VARIANT (10)..(14): Xaa = Any Amino Acid
  misc_feature (15)..(15): Xaa can be any naturally occurring amino acid
CCEYCCNPAXCTGXXCY

SEQ ID NO: 3016 - protein, 18 aa, Artificial Sequence
  Synthetically generated peptide
  VARIANT (10)..(14): Xaa = Any Amino Acid
  misc_feature (15)..(16): Xaa can be any naturally occurring amino acid
CCEYCCNPAXCTGXXXCY

SEQ ID NO: 3017 - protein, 18 aa, Artificial Sequence
  Synthetically generated peptide
  VARIANT (10)..(14): Xaa = Any Amino Acid
  misc_feature (15)..(15): Xaa can be any naturally occurring amino acid
  misc_feature (17)..(17): Xaa can be any naturally occurring amino acid
CCEYCCNPAXCTGXXCXY

SEQ ID NO: 3018 - protein, 17 aa, Artificial Sequence
  Synthetically generated peptide
  VARIANT (10)..(14): Xaa = Any Amino Acid
  misc_feature (16)..(16): Xaa can be any naturally occurring amino acid
CCEYCCNPAXCTGXCXY

SEQ ID NO: 3019 - protein, 18 aa, Artificial Sequence
  Synthetically generated peptide
  VARIANT (10)..(14): Xaa = Any Amino Acid
  misc_feature (16)..(17): Xaa can be any naturally occurring amino acid
CCEYCCNPAXCTGXCXXY

SEQ ID NO: 3020 - protein, 16 aa, Artificial Sequence
  Synthetically generated peptide
  VARIANT (10)..(15): Xaa = Any Amino Acid
CCEYCCNPAXCTGCXY

SEQ ID NO: 3021 - protein, 17 aa, Artificial Sequence
  Synthetically generated peptide
  VARIANT (10)..(15): Xaa = Any Amino Acid
  misc_feature (16)..(16): Xaa can be any naturally occurring amino acid
CCEYCCNPAXCTGCXXY

SEQ ID NO: 3022 - protein, 18 aa, Artificial Sequence
  Synthetically generated peptide
  VARIANT (10)..(15): Xaa = Any Amino Acid
  misc_feature (16)..(17): Xaa can be any naturally occurring amino acid
CCEYCCNPAXCTGCXXXY

SEQ ID NO: 3023 - protein, 15 aa, Artificial Sequence
  Synthetically generated peptide
  VARIANT (11)..(11): Xaa = Any Amino Acid
CCEYCCNPACXTGCY

SEQ ID NO: 3024 - protein, 16 aa, Artificial Sequence
  Synthetically generated peptide
  VARIANT (11)..(12): Xaa = Any Amino Acid
CCEYCCNPACXXTGCY

SEQ ID NO: 3025 - protein, 17 aa, Artificial Sequence
  Synthetically generated peptide
  VARIANT (11)..(12): Xaa = Any Amino Acid
  misc_feature (13)..(13): Xaa can be any naturally occurring amino acid
CCEYCCNPACXXXTGCY

SEQ ID NO: 3026 - protein, 18 aa, Artificial Sequence
  Synthetically generated peptide
  VARIANT (11)..(12): Xaa = Any Amino Acid
  misc_feature (13)..(14): Xaa can be any naturally occurring amino acid
CCEYCCNPACXXXXTGCY

SEQ ID NO: 3027 - protein, 18 aa, Artificial Sequence
  Synthetically generated peptide
  VARIANT (11)..(12): Xaa = Any Amino Acid
  misc_feature (13)..(13): Xaa can be any naturally occurring amino acid
  misc_feature (15)..(15): Xaa can be any naturally occurring amino acid
CCEYCCNPACXXXTXGCY

SEQ ID NO: 3028 - protein, 18 aa, Artificial Sequence
  Synthetically generated peptide
  VARIANT (11)..(12): Xaa = Any Amino Acid
  misc_feature (13)..(13): Xaa can be any naturally occurring amino acid
  misc_feature (16)..(16): Xaa can be any naturally occurring amino acid
CCEYCCNPACXXXTGXCY

SEQ ID NO: 3029 - protein, 18 aa, Artificial Sequence
  Synthetically generated peptide
  VARIANT (11)..(12): Xaa = Any Amino Acid
  misc_feature (13)..(13): Xaa can be any naturally occurring amino acid
  misc_feature (17)..(17): Xaa can be any naturally occurring amino acid
CCEYCCNPACXXXTGCXY

SEQ ID NO: 3030 - protein, 17 aa, Artificial Sequence
  Synthetically generated peptide
  VARIANT (11)..(12): Xaa = Any Amino Acid
  misc_feature (14)..(14): Xaa can be any naturally occurring amino acid
CCEYCCNPACXXTXGCY

SEQ ID NO: 3031 - protein, 18 aa, Artificial Sequence
  Synthetically generated peptide
  VARIANT (11)..(12): Xaa = Any Amino Acid
  misc_feature (14)..(15): Xaa can be any naturally occurring amino acid
CCEYCCNPACXXTXXGCY

SEQ ID NO: 3032 - protein, 18 aa, Artificial Sequence
  Synthetically generated peptide
  VARIANT (11)..(12): Xaa = Any Amino Acid
  misc_feature (14)..(14): Xaa can be any naturally occurring amino acid
  misc_feature (16)..(16): Xaa can be any naturally occurring amino acid
CCEYCCNPACXXTXGXCY

SEQ ID NO: 3033 - protein, 18 aa, Artificial Sequence
  Synthetically generated peptide
  VARIANT (11)..(12): Xaa = Any Amino Acid
  misc_feature (14)..(14): Xaa can be any naturally occurring amino acid
  misc_feature (17)..(17): Xaa can be any naturally occurring amino acid
CCEYCCNPACXXTXGCXY

SEQ ID NO: 3034 - protein, 17 aa, Artificial Sequence
  Synthetically generated peptide
  VARIANT (11)..(12): Xaa = Any Amino Acid
  misc_feature (15)..(15): Xaa can be any naturally occurring amino acid
CCEYCCNPACXXTGXCY

SEQ ID NO: 3035 - protein, 18 aa, Artificial Sequence
  Synthetically generated peptide
  VARIANT (11)..(12): Xaa = Any Amino Acid
  misc_feature (15)..(16): Xaa can be any naturally occurring amino acid
CCEYCCNPACXXTGXXCY

SEQ ID NO: 3036 - protein, 18 aa, Artificial Sequence
  Synthetically generated peptide
  VARIANT (11)..(12): Xaa = Any Amino Acid
  misc_feature (15)..(15): Xaa can be any naturally occurring amino acid
  misc_feature (17)..(17): Xaa can be any naturally occurring amino acid
CCEYCCNPACXXTGXCXY

SEQ ID NO: 3037 - protein, 17 aa, Artificial Sequence
  Synthetically generated peptide
  VARIANT (11)..(12): Xaa = Any Amino Acid
  misc_feature (16)..(16): Xaa can be any naturally occurring amino acid
CCEYCCNPACXXTGCXY

SEQ ID NO: 3038 - protein, 18 aa, Artificial Sequence
  Synthetically generated peptide
  VARIANT (11)..(12): Xaa = Any Amino Acid
  misc_feature (16)..(17): Xaa can be any naturally occurring amino acid
CCEYCCNPACXXTGCXXY

SEQ ID NO: 3039 - protein, 16 aa, Artificial Sequence
  Synthetically generated peptide
  VARIANT (11)..(13): Xaa = Any Amino Acid
CCEYCCNPACXTXGCY

SEQ ID NO: 3040 - protein, 17 aa, Artificial Sequence
  Synthetically generated peptide
  VARIANT (11)..(13): Xaa = Any Amino Acid
  misc_feature (14)..(14): Xaa can be any naturally occurring amino acid
CCEYCCNPACXTXXGCY

SEQ ID NO: 3041 - protein, 18 aa, Artificial Sequence
  Synthetically generated peptide
  VARIANT (11)..(13): Xaa = Any Amino Acid
  misc_feature (14)..(15): Xaa can be any naturally occurring amino acid
CCEYCCNPACXTXXXGCY

SEQ ID NO: 3042 - protein, 18 aa, Artificial Sequence
  Synthetically generated peptide
  VARIANT (11)..(13): Xaa = Any Amino Acid
  misc_feature (14)..(14): Xaa can be any naturally occurring amino acid
  misc_feature (16)..(16): Xaa can be any naturally occurring amino acid
CCEYCCNPACXTXXGXCY

SEQ ID NO: 3043 - protein, 18 aa, Artificial Sequence
  Synthetically generated peptide
  VARIANT (11)..(13): Xaa = Any Amino Acid
  misc_feature (14)..(14): Xaa can be any naturally occurring amino acid
  misc_feature (17)..(17): Xaa can be any naturally occurring amino acid
CCEYCCNPACXTXXGCXY

SEQ ID NO: 3044 - protein, 17 aa, Artificial Sequence
  Synthetically generated peptide
  VARIANT (11)..(13): Xaa = Any Amino Acid
  misc_feature (15)..(15): Xaa can be any naturally occurring amino acid
CCEYCCNPACXTXGXCY

SEQ ID NO: 3045 - protein, 18 aa, Artificial Sequence
  Synthetically generated peptide
  VARIANT (11)..(13): Xaa = Any Amino Acid
  misc_feature (15)..(16): Xaa can be any naturally occurring amino acid
CCEYCCNPACXTXGXXCY

SEQ ID NO: 3046 - protein, 18 aa, Artificial Sequence
  Synthetically generated peptide
  VARIANT (11)..(13): Xaa = Any Amino Acid
  misc_feature (15)..(15): Xaa can be any naturally occurring amino acid
  misc_feature (17)..(17): Xaa can be any naturally occurring amino acid
CCEYCCNPACXTXGXCXY

SEQ ID NO: 3047 - protein, 17 aa, Artificial Sequence
  Synthetically generated peptide
  VARIANT (11)..(13): Xaa = Any Amino Acid
  misc_feature (16)..(16): Xaa can be any naturally occurring amino acid
CCEYCCNPACXTXGCXY

SEQ ID NO: 3048 - protein, 18 aa, Artificial Sequence
  Synthetically generated peptide
  VARIANT (11)..(13): Xaa = Any Amino Acid
  misc_feature (16)..(17): Xaa can be any naturally occurring amino acid
CCEYCCNPACXTXGCXXY

SEQ ID NO: 3049 - protein, 16 aa, Artificial Sequence
  Synthetically generated peptide
  VARIANT (11)..(14): Xaa = Any Amino Acid
CCEYCCNPACXTGXCY

SEQ ID NO: 3050 - protein, 17 aa, Artificial Sequence
  Synthetically generated peptide
  VARIANT (11)..(14): Xaa = Any Amino Acid
  misc_feature (15)..(15): Xaa can be any naturally occurring amino acid
CCEYCCNPACXTGXXCY

SEQ ID NO: 3051 - protein, 18 aa, Artificial Sequence
  Synthetically generated peptide
  VARIANT (11)..(14): Xaa = Any Amino Acid
  misc_feature (15)..(16): Xaa can be any naturally occurring amino acid
CCEYCCNPACXTGXXXCY

SEQ ID NO: 3052 - protein, 18 aa, Artificial Sequence
  Synthetically generated peptide
  VARIANT (11)..(14): Xaa = Any Amino Acid
  misc_feature (15)..(15): Xaa can be any naturally occurring amino acid
  misc_feature (17)..(17): Xaa can be any naturally occurring amino acid
CCEYCCNPACXTGXXCXY

SEQ ID NO: 3053 - protein, 17 aa, Artificial Sequence
  Synthetically generated peptide
  VARIANT (11)..(14): Xaa = Any Amino Acid
  misc_feature (16)..(16): Xaa can be any naturally occurring amino acid
CCEYCCNPACXTGXCXY

SEQ ID NO: 3054 - protein, 18 aa, Artificial Sequence
  Synthetically generated peptide
  VARIANT (11)..(14): Xaa = Any Amino Acid
  misc_feature (16)..(17): Xaa can be any naturally occurring amino acid
CCEYCCNPACXTGXCXXY

SEQ ID NO: 3055 - protein, 16 aa, Artificial Sequence
  Synthetically generated peptide
  VARIANT (11)..(15): Xaa = Any Amino Acid
CCEYCCNPACXTGCXY

SEQ ID NO: 3056 - protein, 17 aa, Artificial Sequence
  Synthetically generated peptide
  VARIANT (11)..(15): Xaa = Any Amino Acid
  misc_feature (16)..(16): Xaa can be any naturally occurring amino acid
CCEYCCNPACXTGCXXY

SEQ ID NO: 3057 - protein, 18 aa, Artificial Sequence
  Synthetically generated peptide
  VARIANT (11)..(15): Xaa = Any Amino Acid
  misc_feature (16)..(17): Xaa can be any naturally occurring amino acid
CCEYCCNPACXTGCXXXY

SEQ ID NO: 3058 - protein, 15 aa, Artificial Sequence
  Synthetically generated peptide
  VARIANT (12)..(12): Xaa = Any Amino Acid
CCEYCCNPACTXGCY

SEQ ID NO: 3059 - protein, 16 aa, Artificial Sequence
  Synthetically generated peptide
  VARIANT (12)..(13): Xaa = Any Amino Acid
CCEYCCNPACTXXGCY

SEQ ID NO: 3060 - protein, 17 aa, Artificial Sequence
  Synthetically generated peptide
  VARIANT (12)..(13): Xaa = Any Amino Acid
  misc_feature (14)..(14): Xaa can be any naturally occurring amino acid
CCEYCCNPACTXXXGCY

SEQ ID NO: 3061 - protein, 18 aa, Artificial Sequence
  Synthetically generated peptide
  VARIANT (12)..(13): Xaa = Any Amino Acid
  misc_feature (14)..(15): Xaa can be any naturally occurring amino acid
CCEYCCNPACTXXXXGCY

SEQ ID NO: 3062 - protein, 18 aa, Artificial Sequence
  Synthetically generated peptide
  VARIANT (12)..(13): Xaa = Any Amino Acid
  misc_feature (14)..(14): Xaa can be any naturally occurring amino acid
  misc_feature (16)..(16): Xaa can be any naturally occurring amino acid
CCEYCCNPACTXXXGXCY

SEQ ID NO: 3063 - protein, 18 aa, Artificial Sequence
  Synthetically generated peptide
  VARIANT (12)..(13): Xaa = Any Amino Acid
  misc_feature (14)..(14): Xaa can be any naturally occurring amino acid
  misc_feature (17)..(17): Xaa can be any naturally occurring amino acid
CCEYCCNPACTXXXGCXY

SEQ ID NO: 3064 - protein, 17 aa, Artificial Sequence
  Synthetically generated peptide
  VARIANT (12)..(13): Xaa = Any Amino Acid
  misc_feature (15)..(15): Xaa can be any naturally occurring amino acid
CCEYCCNPACTXXGXCY

SEQ ID NO: 3065 - protein, 18 aa, Artificial Sequence
  Synthetically generated peptide
  VARIANT (12)..(13): Xaa = Any Amino Acid
  misc_feature (15)..(16): Xaa can be any naturally occurring amino acid
CCEYCCNPACTXXGXXCY

SEQ ID NO: 3066 - protein, 18 aa, Artificial Sequence
  Synthetically generated peptide
  VARIANT (12)..(13): Xaa = Any Amino Acid
  misc_feature (15)..(15): Xaa can be any naturally occurring amino acid
  misc_feature (17)..(17): Xaa can be any naturally occurring amino acid
CCEYCCNPACTXXGXCXY

SEQ ID NO: 3067 - protein, 17 aa, Artificial Sequence
  Synthetically generated peptide
  VARIANT (12)..(13): Xaa = Any Amino Acid
  misc_feature (16)..(16): Xaa can be any naturally occurring amino acid
CCEYCCNPACTXXGCXY

SEQ ID NO: 3068 - protein, 18 aa, Artificial Sequence
  Synthetically generated peptide
  VARIANT (12)..(13): Xaa = Any Amino Acid
  misc_feature (16)..(17): Xaa can be any naturally occurring amino acid
CCEYCCNPACTXXGCXXY

SEQ ID NO: 3069 - protein, 16 aa, Artificial Sequence
  Synthetically generated peptide
  VARIANT (12)..(14): Xaa = Any Amino Acid
CCEYCCNPACTXGXCY

SEQ ID NO: 3070 - protein, 17 aa, Artificial Sequence
  Synthetically generated peptide
  VARIANT (12)..(14): Xaa = Any Amino Acid
  misc_feature (15)..(15): Xaa can be any naturally occurring amino acid
CCEYCCNPACTXGXXCY

SEQ ID NO: 3071 - protein, 18 aa, Artificial Sequence
  Synthetically generated peptide
  VARIANT (12)..(14): Xaa = Any Amino Acid
  misc_feature (15)..(16): Xaa can be any naturally occurring amino acid
CCEYCCNPACTXGXXXCY

SEQ ID NO: 3072 - protein, 18 aa, Artificial Sequence
  Synthetically generated peptide
  VARIANT (12)..(14): Xaa = Any Amino Acid
  misc_feature (15)..(15): Xaa can be any naturally occurring amino acid
  misc_feature (17)..(17): Xaa can be any naturally occurring amino acid
CCEYCCNPACTXGXXCXY

SEQ ID NO: 3073 - protein, 17 aa, Artificial Sequence
  Synthetically generated peptide
  VARIANT (12)..(14): Xaa = Any Amino Acid
  misc_feature (16)..(16): Xaa can be any naturally occurring amino acid
CCEYCCNPACTXGXCXY

SEQ ID NO: 3074 - protein, 18 aa, Artificial Sequence
  Synthetically generated peptide
  VARIANT (12)..(14): Xaa = Any Amino Acid
  misc_feature (16)..(17): Xaa can be any naturally occurring amino acid
CCEYCCNPACTXGXCXXY

SEQ ID NO: 3075 - protein, 16 aa, Artificial Sequence
  Synthetically generated peptide
  VARIANT (12)..(15): Xaa = Any Amino Acid
CCEYCCNPACTXGCXY

SEQ ID NO: 3076 - protein, 17 aa, Artificial Sequence
  Synthetically generated peptide
  VARIANT (12)..(15): Xaa = Any Amino Acid
  misc_feature (16)..(16): Xaa can be any naturally occurring amino acid
CCEYCCNPACTXGCXXY

SEQ ID NO: 3077 - protein, 18 aa, Artificial Sequence
  Synthetically generated peptide
  VARIANT (12)..(15): Xaa = Any Amino Acid
  misc_feature (16)..(17): Xaa can be any naturally occurring amino acid
CCEYCCNPACTXGCXXXY

SEQ ID NO: 3078 - protein, 15 aa, Artificial Sequence
  Synthetically generated peptide
  VARIANT (13)..(13): Xaa = Any Amino Acid
CCEYCCNPACTGXCY

SEQ ID NO: 3079 - protein, 16 aa, Artificial Sequence
  Synthetically generated peptide
  VARIANT (13)..(14): Xaa = Any Amino Acid
CCEYCCNPACTGXXCY

SEQ ID NO: 3080 - protein, 17 aa, Artificial Sequence
  Synthetically generated peptide
  VARIANT (13)..(14): Xaa = Any Amino Acid
  misc_feature (15)..(15): Xaa can be any naturally occurring amino acid
CCEYCCNPACTGXXXCY

SEQ ID NO: 3081 - protein, 18 aa, Artificial Sequence
  Synthetically generated peptide
  VARIANT (13)..(14): Xaa = Any Amino Acid
  misc_feature (15)..(16): Xaa can be any naturally occurring amino acid
CCEYCCNPACTGXXXXCY

SEQ ID NO: 3082 - protein, 18 aa, Artificial Sequence
  Synthetically generated peptide
  VARIANT (13)..(14): Xaa = Any Amino Acid
  misc_feature (15)..(15): Xaa can be any naturally occurring amino acid
  misc_feature (17)..(17): Xaa can be any naturally occurring amino acid
CCEYCCNPACTGXXXCXY

SEQ ID NO: 3083 - protein, 17 aa, Artificial Sequence
  Synthetically generated peptide
  VARIANT (13)..(14): Xaa = Any Amino Acid
  misc_feature (16)..(16): Xaa can be any naturally occurring amino acid
CCEYCCNPACTGXXCXY

SEQ ID NO: 3084 - protein, 18 aa, Artificial Sequence
  Synthetically generated peptide
  VARIANT (13)..(14): Xaa = Any Amino Acid
  misc_feature (16)..(17): Xaa can be any naturally occurring amino acid
CCEYCCNPACTGXXCXXY

SEQ ID NO: 3085 - protein, 16 aa, Artificial Sequence
  Synthetically generated peptide
  VARIANT (13)..(15): Xaa = Any Amino Acid
CCEYCCNPACTGXCXY

SEQ ID NO: 3086 - protein, 17 aa, Artificial Sequence
  Synthetically generated peptide
  VARIANT (13)..(15): Xaa = Any Amino Acid
  misc_feature (16)..(16): Xaa can be any naturally occurring amino acid
CCEYCCNPACTGXCXXY

SEQ ID NO: 3087 - protein, 18 aa, Artificial Sequence
  Synthetically generated peptide
  VARIANT (13)..(15): Xaa = Any Amino Acid
  misc_feature (16)..(17): Xaa can be any naturally occurring amino acid
CCEYCCNPACTGXCXXXY

SEQ ID NO: 3088 - protein, 15 aa, Artificial Sequence
  Synthetically generated peptide
  VARIANT (14)..(14): Xaa = Any Amino Acid
CCEYCCNPACTGCXY

SEQ ID NO: 3089 - protein, 16 aa, Artificial Sequence
  Synthetically generated peptide
  VARIANT (14)..(15): Xaa = Any Amino Acid
CCEYCCNPACTGCXXY

SEQ ID NO: 3090 - protein, 17 aa, Artificial Sequence
  Synthetically generated peptide
  VARIANT (14)..(15): Xaa = Any Amino Acid
  misc_feature (16)..(16): Xaa can be any naturally occurring amino acid
CCEYCCNPACTGCXXXY

SEQ ID NO: 3091 - protein, 18 aa, Artificial Sequence
  Synthetically generated peptide
  VARIANT (14)..(15): Xaa = Any Amino Acid
  misc_feature (16)..(17): Xaa can be any naturally occurring amino acid
CCEYCCNPACTGCXXXXY

SEQ ID NO: 3092 - DNA, 42 bp, Artificial Sequence
  Synthetically generated oligonucleotide
cacaccatatgaagaaatcaatattatttatttttctttctg

SEQ ID NO: 3093 - DNA, 46 bp, Artificial Sequence
  Synthetically generated oligonucleotide
cacacctcgagttaggtctccatgctttcaggaccacttttattac

SEQ ID NO: 3094 - DNA, 69 bp, Artificial Sequence
  Synthetically generated oligonucleotide
gcatgaatagtagcaattactgctgtgaattgtgttgtaatcctgcttgtaccgggtgctattaataac

SEQ ID NO: 3095 - DNA, 69 bp, Artificial Sequence
  Synthetically generated oligonucleotide
tcgagttattaatagcacccggtacaagcaggattacaacacaattcacagcagtaattgctactattc

SEQ ID NO: 3096 - DNA, 69 bp, Artificial Sequence
  Synthetically generated oligonucleotide
gcatgaatagtagcaattactgctgtgaatattgttgtaatcctgcttgtaccgggtgctattaataac

SEQ ID NO: 3097 - DNA, 69 bp, Artificial Sequence
  Synthetically generated oligonucleotide
tcgagttattaatagcacccggtacaagcaggattacaacaatattcacagcagtaattgctactattc

SEQ ID NO: 3098 - protein, 5 aa, Artificial Sequence
  Synthetically generated peptide
QHNPR

SEQ ID NO: 3099 - protein, 6 aa, Artificial Sequence
  Synthetically generated peptide
VQHNPR

SEQ ID NO: 3100 - protein, 7 aa, Artificial Sequence
  Synthetically generated peptide
VRQHNPR

SEQ ID NO: 3101 - protein, 8 aa, Artificial Sequence
  Synthetically generated peptide
VRGQHNPR

SEQ ID NO: 3102 - protein, 9 aa, Artificial Sequence
  Synthetically generated peptide
VRGPQHNPR

SEQ ID NO: 3103 - protein, 10 aa, Artificial Sequence
  Synthetically generated peptide
VRGPRQHNPR

SEQ ID NO: 3104 - protein, 11 aa, Artificial Sequence
  Synthetically generated peptide
VRGPRRQHNPR

SEQ ID NO: 3105 - protein, 6 aa, Artificial Sequence
  Synthetically generated peptide
RQHNPR

SEQ ID NO: 3106 - protein, 14 aa, Artificial Sequence
  Synthetically generated peptide
CCELCCAPACTGCY

SEQ ID NO: 3107 - protein, 14 aa, Artificial Sequence
  Synthetically generated peptide
CCELCCVPACTGCY

SEQ ID NO: 3108 - protein, 14 aa, Artificial Sequence
  Synthetically generated peptide
CCELCCLPACTGCY

SEQ ID NO: 3109 - protein, 14 aa, Artificial Sequence
  Synthetically generated peptide
CCELCCIPACTGCY

SEQ ID NO: 3110 - protein, 14 aa, Artificial Sequence
  Synthetically generated peptide
CCELCCPPACTGCY

SEQ ID NO: 3111 - protein, 14 aa, Artificial Sequence
  Synthetically generated peptide
CCELCCMPACTGCY

SEQ ID NO: 3112 - protein, 14 aa, Artificial Sequence
  Synthetically generated peptide
CCELCCFPACTGCY

SEQ ID NO: 3113 - protein, 14 aa, Artificial Sequence
  Synthetically generated peptide
CCELCCWPACTGCY

SEQ ID NO: 3114 - protein, 14 aa, Artificial Sequence
  Synthetically generated peptide
CCELCCGPACTGCY

SEQ ID NO: 3115 - protein, 14 aa, Artificial Sequence
  Synthetically generated peptide
CCELCCSPACTGCY

SEQ ID NO: 3116 - protein, 14 aa, Artificial Sequence
  Synthetically generated peptide
CCELCCTPACTGCY

SEQ ID NO: 3117 - protein, 14 aa, Artificial Sequence
  Synthetically generated peptide
CCELCCCPACTGCY

SEQ ID NO: 3118 - protein, 14 aa, Artificial Sequence
  Synthetically generated peptide
CCELCCQPACTGCY

SEQ ID NO: 3119 - protein, 14 aa, Artificial Sequence
  Synthetically generated peptide
CCELCCYPACTGCY

SEQ ID NO: 3120 - protein, 14 aa, Artificial Sequence
  Synthetically generated peptide
CCELCCDPACTGCY

SEQ ID NO: 3121 - protein, 14 aa, Artificial Sequence
  Synthetically generated peptide
CCELCCEPACTGCY

SEQ ID NO: 3122 - protein, 14 aa, Artificial Sequence
  Synthetically generated peptide
CCELCCKPACTGCY

SEQ ID NO: 3123 - protein, 14 aa, Artificial Sequence
  Synthetically generated peptide
CCELCCRPACTGCY

SEQ ID NO: 3124 - protein, 14 aa, Artificial Sequence
  Synthetically generated peptide
CCELCCHPACTGCY

SEQ ID NO: 3125 - protein, 14 aa, Artificial Sequence
  Synthetically generated peptide
CCEYCCAPACTGCY

SEQ ID NO: 3126 - protein, 14 aa, Artificial Sequence
  Synthetically generated peptide
CCEYCCVPACTGCY

SEQ ID NO: 3127 - protein, 14 aa, Artificial Sequence
  Synthetically generated peptide
CCEYCCLPACTGCY

SEQ ID NO: 3128 - protein, 14 aa, Artificial Sequence
  Synthetically generated peptide
CCEYCCIPACTGCY

SEQ ID NO: 3129 - protein, 14 aa, Artificial Sequence
  Synthetically generated peptide
CCEYCCPPACTGCY

SEQ ID NO: 3130 - protein, 14 aa, Artificial Sequence
  Synthetically generated peptide
CCEYCCMPACTGCY

SEQ ID NO: 3131 - protein, 14 aa, Artificial Sequence
  Synthetically generated peptide
CCEYCCFPACTGCY

SEQ ID NO: 3132 - protein, 14 aa, Artificial Sequence
  Synthetically generated peptide
CCEYCCWPACTGCY

SEQ ID NO: 3133 - protein, 14 aa, Artificial Sequence
  Synthetically generated peptide
CCEYCCGPACTGCY

SEQ ID NO: 3134 - protein, 14 aa, Artificial Sequence
  Synthetically generated peptide
CCEYCCSPACTGCY

SEQ ID NO: 3135 - protein, 14 aa, Artificial Sequence
  Synthetically generated peptide
CCEYCCTPACTGCY

SEQ ID NO: 3136 - protein, 14 aa, Artificial Sequence
  Synthetically generated peptide
CCEYCCCPACTGCY

SEQ ID NO: 3137 - protein, 14 aa, Artificial Sequence
  Synthetically generated peptide
CCEYCCQPACTGCY

SEQ ID NO: 3138 - protein, 14 aa, Artificial Sequence
  Synthetically generated peptide
CCEYCCYPACTGCY

SEQ ID NO: 3139 - protein, 14 aa, Artificial Sequence
  Synthetically generated peptide
CCEYCCDPACTGCY

SEQ ID NO: 3140 - protein, 14 aa, Artificial Sequence
  Synthetically generated peptide
CCEYCCEPACTGCY

SEQ ID NO: 3141 - protein, 14 aa, Artificial Sequence
  Synthetically generated peptide
CCEYCCKPACTGCY

SEQ ID NO: 3142 - protein, 14 aa, Artificial Sequence
  Synthetically generated peptide
CCEYCCRPACTGCY

SEQ ID NO: 3143 - protein, 14 aa, Artificial Sequence
  Synthetically generated peptide
CCEYCCHPACTGCY

SEQ ID NO: 3144 - protein, 13 aa, Artificial Sequence
  Synthetically generated peptide
CCELCCAPACTGC

SEQ ID NO: 3145 - protein, 13 aa, Artificial Sequence
  Synthetically generated peptide
CCELCCVPACTGC

SEQ ID NO: 3146 - protein, 13 aa, Artificial Sequence
  Synthetically generated peptide
CCELCCLPACTGC

SEQ ID NO: 3147 - protein, 13 aa, Artificial Sequence
  Synthetically generated peptide
CCELCCIPACTGC

SEQ ID NO: 3148 - protein, 13 aa, Artificial Sequence
  Synthetically generated peptide
CCELCCPPACTGC

SEQ ID NO: 3149 - protein, 13 aa, Artificial Sequence
  Synthetically generated peptide
CCELCCMPACTGC

SEQ ID NO: 3150 - protein, 13 aa, Artificial Sequence
  Synthetically generated peptide
CCELCCFPACTGC

SEQ ID NO: 3151 - protein, 13 aa, Artificial Sequence
  Synthetically generated peptide
CCELCCWPACTGC

SEQ ID NO: 3152 - protein, 13 aa, Artificial Sequence
  Synthetically generated peptide
CCELCCGPACTGC

SEQ ID NO: 3153 - protein, 13 aa, Artificial Sequence
  Synthetically generated peptide
CCELCCSPACTGC

SEQ ID NO: 3154 - protein, 13 aa, Artificial Sequence
  Synthetically generated peptide
CCELCCTPACTGC

SEQ ID NO: 3155 - protein, 13 aa, Artificial Sequence
  Synthetically generated peptide
CCELCCCPACTGC

SEQ ID NO: 3156 - protein, 13 aa, Artificial Sequence
  Synthetically generated peptide
CCELCCQPACTGC

SEQ ID NO: 3157 - protein, 13 aa, Artificial Sequence
  Synthetically generated peptide
CCELCCYPACTGC

SEQ ID NO: 3158 - protein, 13 aa, Artificial Sequence
  Synthetically generated peptide
CCELCCDPACTGC

SEQ ID NO: 3159 - protein, 13 aa, Artificial Sequence
  Synthetically generated peptide
CCELCCEPACTGC

SEQ ID NO: 3160 - protein, 13 aa, Artificial Sequence
  Synthetically generated peptide
CCELCCKPACTGC

SEQ ID NO: 3161 - protein, 13 aa, Artificial Sequence
  Synthetically generated peptide
CCELCCRPACTGC

SEQ ID NO: 3162 - protein, 13 aa, Artificial Sequence
  Synthetically generated peptide
CCELCCHPACTGC

SEQ ID NO: 3163 - protein, 13 aa, Artificial Sequence
  Synthetically generated peptide
CCEYCCAPACTGC

SEQ ID NO: 3164 - protein, 13 aa, Artificial Sequence
  Synthetically generated peptide
CCEYCCVPACTGC

SEQ ID NO: 3165 - protein, 13 aa, Artificial Sequence
  Synthetically generated peptide
CCEYCCLPACTGC

SEQ ID NO: 3166 - protein, 13 aa, Artificial Sequence
  Synthetically generated peptide
CCEYCCIPACTGC

SEQ ID NO: 3167 - protein, 13 aa, Artificial Sequence
  Synthetically generated peptide
CCEYCCPPACTGC

SEQ ID NO: 3168 - protein, 13 aa, Artificial Sequence
  Synthetically generated peptide
CCEYCCMPACTGC

SEQ ID NO: 3169 - protein, 13 aa, Artificial Sequence
  Synthetically generated peptide
CCEYCCFPACTGC

SEQ ID NO: 3170 - protein, 13 aa, Artificial Sequence
  Synthetically generated peptide
CCEYCCWPACTGC

SEQ ID NO: 3171 - protein, 13 aa, Artificial Sequence
  Synthetically generated peptide
CCEYCCGPACTGC

SEQ ID NO: 3172 - protein, 13 aa, Artificial Sequence
  Synthetically generated peptide
CCEYCCSPACTGC

SEQ ID NO: 3173 - protein, 13 aa, Artificial Sequence
  Synthetically generated peptide
CCEYCCTPACTGC

SEQ ID NO: 3174 - protein, 13 aa, Artificial Sequence
  Synthetically generated peptide
CCEYCCCPACTGC

SEQ ID NO: 3175 - protein, 13 aa, Artificial Sequence
  Synthetically generated peptide
CCEYCCQPACTGC

SEQ ID NO: 3176 - protein, 13 aa, Artificial Sequence
  Synthetically generated peptide
CCEYCCYPACTGC

SEQ ID NO: 3177 - protein, 13 aa, Artificial Sequence
  Synthetically generated peptide
CCEYCCDPACTGC

SEQ ID NO: 3178 - protein, 13 aa, Artificial Sequence
  Synthetically generated peptide
CCEYCCEPACTGC

SEQ ID NO: 3179 - protein, 13 aa, Artificial Sequence
  Synthetically generated peptide
CCEYCCKPACTGC

SEQ ID NO: 3180 - protein, 13 aa, Artificial Sequence
  Synthetically generated peptide
CCEYCCRPACTGC

SEQ ID NO: 3181 - protein, 13 aa, Artificial Sequence
  Synthetically generated peptide
CCEYCCHPACTGC

SEQ ID NO: 3182 - protein, 14 aa, Artificial Sequence
  Synthetically generated peptide
CCELCCNPTCTGCY

SEQ ID NO: 3183 - protein, 14 aa, Artificial Sequence
  Synthetically generated peptide
CCEYCCNPTCTGCY

SEQ ID NO: 3184 - protein, 13 aa, Artificial Sequence
  Synthetically generated peptide
CCELCCNPTCTGC

SEQ ID NO: 3185 - protein, 13 aa, Artificial Sequence
  Synthetically generated peptide
CCEYCCNPTCTGC

SEQ ID NO: 3186 - protein, 14 aa, Artificial Sequence
  Synthetically generated peptide
CCEFCCNPTCTGCY

SEQ ID NO: 3187 - protein, 13 aa, Artificial Sequence
  Synthetically generated peptide
CCEFCCNPTCTGC

SEQ ID NO: 3188 - protein, 14 aa, Artificial Sequence
  Synthetically generated peptide
CCEWCCNPTCTGCY

SEQ ID NO: 3189 - protein, 13 aa, Artificial Sequence
  Synthetically generated peptide
CCEWCCNPTCTGC

SEQ ID NO: 3190 - protein, 14 aa, Artificial Sequence
  Synthetically generated peptide
CCELCCNGACTGCY

SEQ ID NO: 3191 - protein, 14 aa, Artificial Sequence
  Synthetically generated peptide
CCEYCCNGACTGCY

SEQ ID NO: 3192 - protein, 13 aa, Artificial Sequence
  Synthetically generated peptide
CCELCCNGACTGC

SEQ ID NO: 3193 - protein, 13 aa, Artificial Sequence
  Synthetically generated peptide
CCEYCCNGACTGC

SEQ ID NO: 3194 - protein, 14 aa, Artificial Sequence
  Synthetically generated peptide
CCEFCCNGACTGCY

SEQ ID NO: 3195 - protein, 13 aa, Artificial Sequence
  Synthetically generated peptide
CCEFCCNGACTGC

SEQ ID NO: 3196 - protein, 14 aa, Artificial Sequence
  Synthetically generated peptide
CCEWCCNGACTGCY

SEQ ID NO: 3197 - protein, 13 aa, Artificial Sequence
  Synthetically generated peptide
CCEWCCNGACTGC

SEQ ID NO: 3198 - protein, 14 aa, Artificial Sequence
  Synthetically generated peptide
CCELCCNPACVGCY

SEQ ID NO: 3199 - protein, 14 aa, Artificial Sequence
  Synthetically generated peptide
CCEYCCNPACVGCY

SEQ ID NO: 3200 - protein, 13 aa, Artificial Sequence
  Synthetically generated peptide
CCELCCNPACVGC

SEQ ID NO: 3201 - protein, 13 aa, Artificial Sequence
  Synthetically generated peptide
CCEYCCNPACVGC

SEQ ID NO: 3202 - protein, 14 aa, Artificial Sequence
  Synthetically generated peptide
CCEFCCNPACVGCY

SEQ ID NO: 3203 - protein, 13 aa, Artificial Sequence
  Synthetically generated peptide
CCEFCCNPACVGC

SEQ ID NO: 3204 - protein, 14 aa, Artificial Sequence
  Synthetically generated peptide
CCEWCCNPACVGCY

SEQ ID NO: 3205 - protein, 13 aa, Artificial Sequence
  Synthetically generated peptide
CCEWCCNPACVGC

SEQ ID NO: 3206 - protein, 14 aa, Artificial Sequence
  Synthetically generated peptide
CCELCCNPACGGCY

SEQ ID NO: 3207 - protein, 14 aa, Artificial Sequence
  Synthetically generated peptide
CCEYCCNPACGGCY

SEQ ID NO: 3208 - protein, 13 aa, Artificial Sequence
  Synthetically generated peptide
CCELCCNPACGGC

SEQ ID NO: 3209 - protein, 13 aa, Artificial Sequence
  Synthetically generated peptide
CCEYCCNPACGGC

SEQ ID NO: 3210 - protein, 14 aa, Artificial Sequence
  Synthetically generated peptide
CCEFCCNPACGGCY

SEQ ID NO: 3211 - protein, 13 aa, Artificial Sequence
  Synthetically generated peptide
CCEFCCNPACGGC

SEQ ID NO: 3212 - protein, 14 aa, Artificial Sequence
  Synthetically generated peptide
CCEWCCNPACGGCY

SEQ ID NO: 3213 - protein, 13 aa, Artificial Sequence
  Synthetically generated peptide
CCEWCCNPACGGC

SEQ ID NO: 3214 - protein, 14 aa, Artificial Sequence
  Synthetically generated peptide
CCELCCNPACTACY

SEQ ID NO: 3215 - protein, 14 aa, Artificial Sequence
  Synthetically generated peptide
CCEYCCNPACTACY

SEQ ID NO: 3216 - protein, 13 aa, Artificial Sequence
  Synthetically generated peptide
CCELCCNPACTAC

SEQ ID NO: 3217 - protein, 13 aa, Artificial Sequence
  Synthetically generated peptide
CCEYCCNPACTAC

SEQ ID NO: 3218 - protein, 14 aa, Artificial Sequence
  Synthetically generated peptide
CCEWCCNPACTACY

SEQ ID NO: 3219 - protein, 13 aa, Artificial Sequence
  Synthetically generated peptide
CCEWCCNPACTAC

SEQ ID NO: 3220 - protein, 14 aa, Artificial Sequence
  Synthetically generated peptide
CCEFCCNPACTACY

SEQ ID NO: 3221 - protein, 13 aa, Artificial Sequence
  Synthetically generated peptide
CCEFCCNPACTAC

SEQ ID NO: 3222 - protein, 14 aa, Artificial Sequence
  Synthetically generated peptide
CCELCCNPACTGCA

SEQ ID NO: 3223 - protein, 14 aa, Artificial Sequence
  Synthetically generated peptide
CCELCCNPACTGCV

SEQ ID NO: 3224 - protein, 14 aa, Artificial Sequence
  Synthetically generated peptide
CCELCCNPACTGCL

SEQ ID NO: 3225 - protein, 14 aa, Artificial Sequence
  Synthetically generated peptide
CCELCCNPACTGCI

SEQ ID NO: 3226 - protein, 14 aa, Artificial Sequence
  Synthetically generated peptide
CCELCCNPACTGCP

SEQ ID NO: 3227 - protein, 14 aa, Artificial Sequence
  Synthetically generated peptide
CCELCCNPACTGCM

SEQ ID NO: 3228 - protein, 14 aa, Artificial Sequence
  Synthetically generated peptide
CCELCCNPACTGCF

SEQ ID NO: 3229 - protein, 14 aa, Artificial Sequence
  Synthetically generated peptide
CCELCCNPACTGCW

SEQ ID NO: 3230 - protein, 14 aa, Artificial Sequence
  Synthetically generated peptide
CCELCCNPACTGCG

SEQ ID NO: 3231 - protein, 14 aa, Artificial Sequence
  Synthetically generated peptide
CCELCCNPACTGCS

SEQ ID NO: 3232 - protein, 14 aa, Artificial Sequence
  Synthetically generated peptide
CCELCCNPACTGCT

SEQ ID NO: 3233 - protein, 14 aa, Artificial Sequence
  Synthetically generated peptide
CCELCCNPACTGCC

SEQ ID NO: 3234 - protein, 14 aa, Artificial Sequence
  Synthetically generated peptide
CCELCCNPACTGCN

SEQ ID NO: 3235 - protein, 14 aa, Artificial Sequence
  Synthetically generated peptide
CCELCCNPACTGCQ

SEQ ID NO: 3236 - protein, 14 aa, Artificial Sequence
  Synthetically generated peptide
CCELCCNPACTGCD

SEQ ID NO: 3237 - protein, 14 aa, Artificial Sequence
  Synthetically generated peptide
CCELCCNPACTGCE

SEQ ID NO: 3238 - protein, 14 aa, Artificial Sequence
  Synthetically generated peptide
CCELCCNPACTGCK

SEQ ID NO: 3239 - protein, 14 aa, Artificial Sequence
  Synthetically generated peptide
CCELCCNPACTGCR

SEQ ID NO: 3240 - protein, 14 aa, Artificial Sequence
  Synthetically generated peptide
CCELCCNPACTGCH

SEQ ID NO: 3241 - protein, 14 aa, Artificial Sequence
  Synthetically generated peptide
CCEYCCNPACTGCA

SEQ ID NO: 3242 - protein, 14 aa, Artificial Sequence
  Synthetically generated peptide
CCEYCCNPACTGCV

SEQ ID NO: 3243 - protein, 14 aa, Artificial Sequence
  Synthetically generated peptide
CCEYCCNPACTGCL

SEQ ID NO: 3244 - protein, 14 aa, Artificial Sequence
  Synthetically generated peptide
CCEYCCNPACTGCI

SEQ ID NO: 3245 - protein, 14 aa, Artificial Sequence
  Synthetically generated peptide
CCEYCCNPACTGCP

SEQ ID NO: 3246 - protein, 14 aa, Artificial Sequence
  Synthetically generated peptide
CCEYCCNPACTGCM

SEQ ID NO: 3247 - protein, 14 aa, Artificial Sequence
  Synthetically generated peptide
CCEYCCNPACTGCF

SEQ ID NO: 3248 - protein, 14 aa, Artificial Sequence
  Synthetically generated peptide
CCEYCCNPACTGCW

SEQ ID NO: 3249 - protein, 14 aa, Artificial Sequence
  Synthetically generated peptide
CCEYCCNPACTGCG

SEQ ID NO: 3250 - protein, 14 aa, Artificial Sequence
  Synthetically generated peptide
CCEYCCNPACTGCS

SEQ ID NO: 3251 - protein, 14 aa, Artificial Sequence
  Synthetically generated peptide
CCEYCCNPACTGCT

SEQ ID NO: 3252 - protein, 14 aa, Artificial Sequence
  Synthetically generated peptide
CCEYCCNPACTGCC

SEQ ID NO: 3253 - protein, 14 aa, Artificial Sequence
  Synthetically generated peptide
CCEYCCNPACTGCN

SEQ ID NO: 3254 - protein, 14 aa, Artificial Sequence
  Synthetically generated peptide
CCEYCCNPACTGCQ

SEQ ID NO: 3255 - protein, 14 aa, Artificial Sequence
  Synthetically generated peptide
CCEYCCNPACTGCD

SEQ ID NO: 3256 - protein, 14 aa, Artificial Sequence
  Synthetically generated peptide
CCEYCCNPACTGCE

SEQ ID NO: 3257 - protein, 14 aa, Artificial Sequence
  Synthetically generated peptide
CCEYCCNPACTGCK

SEQ ID NO: 3258 - protein, 14 aa, Artificial Sequence
  Synthetically generated peptide
CCEYCCNPACTGCR

SEQ ID NO: 3259 - protein, 14 aa, Artificial Sequence
  Synthetically generated peptide
CCEYCCNPACTGCH

SEQ ID NO: 3260 - protein, 14 aa, Artificial Sequence
  Synthetically generated peptide
CCALCCNPACTGCY

SEQ ID NO: 3261 - protein, 14 aa, Artificial Sequence
  Synthetically generated peptide
CCVLCCNPACTGCY

SEQ ID NO: 3262 - protein, 14 aa, Artificial Sequence
  Synthetically generated peptide
CCLLCCNPACTGCY

SEQ ID NO: 3263 - protein, 14 aa, Artificial Sequence
  Synthetically generated peptide
CCILCCNPACTGCY

SEQ ID NO: 3264 - protein, 14 aa, Artificial Sequence
  Synthetically generated peptide
CCMLCCNPACTGCY

SEQ ID NO: 3265 - protein, 14 aa, Artificial Sequence
  Synthetically generated peptide
CCFLCCNPACTGCY

SEQ ID NO: 3266 - protein, 14 aa, Artificial Sequence
  Synthetically generated peptide
CCWLCCNPACTGCY

SEQ ID NO: 3267 - protein, 14 aa, Artificial Sequence
  Synthetically generated peptide
CCGLCCNPACTGCY

SEQ ID NO: 3268 - protein, 14 aa, Artificial Sequence
  Synthetically generated peptide
CCSLCCNPACTGCY

SEQ ID NO: 3269 - protein, 14 aa, Artificial Sequence
  Synthetically generated peptide
CCTLCCNPACTGCY

SEQ ID NO: 3270 - protein, 14 aa, Artificial Sequence
  Synthetically generated peptide
CCCLCCNPACTGCY

SEQ ID NO: 3271 - protein, 14 aa, Artificial Sequence
  Synthetically generated peptide
CCNLCCNPACTGCY

SEQ ID NO: 3272 - protein, 14 aa, Artificial Sequence
  Synthetically generated peptide
CCQLCCNPACTGCY

SEQ ID NO: 3273 - protein, 14 aa, Artificial Sequence
  Synthetically generated peptide
CCYLCCNPACTGCY

SEQ ID NO: 3274 - protein, 14 aa, Artificial Sequence
  Synthetically generated peptide
CCDLCCNPACTGCY

SEQ ID NO: 3275 - protein, 14 aa, Artificial Sequence
  Synthetically generated peptide
CCKLCCNPACTGCY

SEQ ID NO: 3276 - protein, 14 aa, Artificial Sequence
  Synthetically generated peptide
CCRLCCNPACTGCY

SEQ ID NO: 3277 - protein, 14 aa, Artificial Sequence
  Synthetically generated peptide
CCHLCCNPACTGCY

SEQ ID NO: 3278 - protein, 13 aa, Artificial Sequence
  Synthetically generated peptide
CCALCCNPACTGC

SEQ ID NO: 3279 - protein, 13 aa, Artificial Sequence
  Synthetically generated peptide
CCVLCCNPACTGC

SEQ ID NO: 3280 - protein, 13 aa, Artificial Sequence
  Synthetically generated peptide
CCLLCCNPACTGC

SEQ ID NO: 3281 - protein, 13 aa, Artificial Sequence
  Synthetically generated peptide
CCILCCNPACTGC

SEQ ID NO: 3282 - protein, 13 aa, Artificial Sequence
  Synthetically generated peptide
CCMLCCNPACTGC

SEQ ID NO: 3283 - protein, 13 aa, Artificial Sequence
  Synthetically generated peptide
CCFLCCNPACTGC

SEQ ID NO: 3284 - protein, 13 aa, Artificial Sequence
  Synthetically generated peptide
CCWLCCNPACTGC

SEQ ID NO: 3285 - protein, 13 aa, Artificial Sequence
  Synthetically generated peptide
CCGLCCNPACTGC

SEQ ID NO: 3286 - protein, 13 aa, Artificial Sequence
  Synthetically generated peptide
CCSLCCNPACTGC

SEQ ID NO: 3287 - protein, 13 aa, Artificial Sequence
  Synthetically generated peptide
CCTLCCNPACTGC

SEQ ID NO: 3288 - protein, 13 aa, Artificial Sequence
  Synthetically generated peptide
CCCLCCNPACTGC

SEQ ID NO: 3289 - protein, 13 aa, Artificial Sequence
  Synthetically generated peptide
CCNLCCNPACTGC

SEQ ID NO: 3290 - protein, 13 aa, Artificial Sequence
  Synthetically generated peptide
CCQLCCNPACTGC

SEQ ID NO: 3291 - protein, 13 aa, Artificial Sequence
  Synthetically generated peptide
CCYLCCNPACTGC

SEQ ID NO: 3292 - protein, 13 aa, Artificial Sequence
  Synthetically generated peptide
CCDLCCNPACTGC

SEQ ID NO: 3293 - protein, 13 aa, Artificial Sequence
  Synthetically generated peptide
CCKLCCNPACTGC

SEQ ID NO: 3294 - protein, 13 aa, Artificial Sequence
  Synthetically generated peptide
CCRLCCNPACTGC

SEQ ID NO: 3295 - protein, 13 aa, Artificial Sequence
  Synthetically generated peptide
CCHLCCNPACTGC

SEQ ID NO: 3296 - protein, 14 aa, Artificial Sequence
  Synthetically generated peptide
CCAYCCNPACTGCY

SEQ ID NO: 3297 - protein, 14 aa, Artificial Sequence
  Synthetically generated peptide
CCVYCCNPACTGCY

SEQ ID NO: 3298 - protein, 14 aa, Artificial Sequence
  Synthetically generated peptide
CCLYCCNPACTGCY

SEQ ID NO: 3299 - protein, 14 aa, Artificial Sequence
  Synthetically generated peptide
CCIYCCNPACTGCY

SEQ ID NO: 3300 - protein, 14 aa, Artificial Sequence
  Synthetically generated peptide
CCMYCCNPACTGCY

SEQ ID NO: 3301 - protein, 14 aa, Artificial Sequence
  Synthetically generated peptide
CCFYCCNPACTGCY

SEQ ID NO: 3302 - protein, 14 aa, Artificial Sequence
  Synthetically generated peptide
CCWYCCNPACTGCY

SEQ ID NO: 3303 - protein, 14 aa, Artificial Sequence
  Synthetically generated peptide
CCGYCCNPACTGCY

SEQ ID NO: 3304 - protein, 14 aa, Artificial Sequence
  Synthetically generated peptide
CCSYCCNPACTGCY

SEQ ID NO: 3305 - protein, 14 aa, Artificial Sequence
  Synthetically generated peptide
CCTYCCNPACTGCY

SEQ ID NO: 3306 - protein, 14 aa, Artificial Sequence
  Synthetically generated peptide
CCCYCCNPACTGCY

SEQ ID NO: 3307 - protein, 14 aa, Artificial Sequence
  Synthetically generated peptide
CCNYCCNPACTGCY

SEQ ID NO: 3308 - protein, 14 aa, Artificial Sequence
  Synthetically generated peptide
CCQYCCNPACTGCY

SEQ ID NO: 3309 - protein, 14 aa, Artificial Sequence
  Synthetically generated peptide
CCYYCCNPACTGCY

SEQ ID NO: 3310 - protein, 14 aa, Artificial Sequence
  Synthetically generated peptide
CCDYCCNPACTGCY

SEQ ID NO: 3311 - protein, 14 aa, Artificial Sequence
  Synthetically generated peptide
CCKYCCNPACTGCY

SEQ ID NO: 3312 - protein, 14 aa, Artificial Sequence
  Synthetically generated peptide
CCRYCCNPACTGCY

SEQ ID NO: 3313 - protein, 14 aa, Artificial Sequence
  Synthetically generated peptide
CCHYCCNPACTGCY

SEQ ID NO: 3314 - protein, 13 aa, Artificial Sequence
  Synthetically generated peptide
CCAYCCNPACTGC

SEQ ID NO: 3315 - protein, 13 aa, Artificial Sequence
  Synthetically generated peptide
CCVYCCNPACTGC

SEQ ID NO: 3316 - protein, 13 aa, Artificial Sequence
  Synthetically generated peptide
CCLYCCNPACTGC

SEQ ID NO: 3317 - protein, 13 aa, Artificial Sequence
  Synthetically generated peptide
CCIYCCNPACTGC

SEQ ID NO: 3318 - protein, 13 aa, Artificial Sequence
  Synthetically generated peptide
CCMYCCNPACTGC

SEQ ID NO: 3319 - protein, 13 aa, Artificial Sequence
  Synthetically generated peptide
CCFYCCNPACTGC

SEQ ID NO: 3320 - protein, 13 aa, Artificial Sequence
  Synthetically generated peptide
CCWYCCNPACTGC

SEQ ID NO: 3321 - protein, 13 aa, Artificial Sequence
  Synthetically generated peptide
CCGYCCNPACTGC

SEQ ID NO: 3322 - protein, 13 aa, Artificial Sequence
  Synthetically generated peptide
CCSYCCNPACTGC

SEQ ID NO: 3323 - protein, 13 aa, Artificial Sequence
  Synthetically generated peptide
CCTYCCNPACTGC

SEQ ID NO: 3324 - protein, 13 aa, Artificial Sequence
  Synthetically generated peptide
CCCYCCNPACTGC

SEQ ID NO: 3325 - protein, 13 aa, Artificial Sequence
  Synthetically generated peptide
CCNYCCNPACTGC

SEQ ID NO: 3326 - protein, 13 aa, Artificial Sequence
  Synthetically generated peptide
CCQYCCNPACTGC

SEQ ID NO: 3327 - protein, 13 aa, Artificial Sequence
  Synthetically generated peptide
CCYYCCNPACTGC

SEQ ID NO: 3328 - protein, 13 aa, Artificial Sequence
  Synthetically generated peptide
CCDYCCNPACTGC

SEQ ID NO: 3329 - protein, 13 aa, Artificial Sequence
  Synthetically generated peptide
CCKYCCNPACTGC

SEQ ID NO: 3330 - protein, 13 aa, Artificial Sequence
  Synthetically generated peptide
CCRYCCNPACTGC

SEQ ID NO: 3331 - protein, 13 aa, Artificial Sequence
  Synthetically generated peptide
CCHYCCNPACTGC

SEQ ID NO: 3332 - protein, 14 aa, Artificial Sequence
  Synthetically generated peptide
CCEFCCAPACTGCY

SEQ ID NO: 3333 - protein, 14 aa, Artificial Sequence
  Synthetically generated peptide
CCEFCCVPACTGCY

SEQ ID NO: 3334 - protein, 14 aa, Artificial Sequence
  Synthetically generated peptide
CCEFCCLPACTGCY

SEQ ID NO: 3335 - protein, 14 aa, Artificial Sequence
  Synthetically generated peptide
CCEFCCIPACTGCY

SEQ ID NO: 3336 - protein, 14 aa, Artificial Sequence
  Synthetically generated peptide
CCEFCCPPACTGCY

SEQ ID NO: 3337 - protein, 14 aa, Artificial Sequence
  Synthetically generated peptide
CCEFCCMPACTGCY

SEQ ID NO: 3338 - protein, 14 aa, Artificial Sequence
  Synthetically generated peptide
CCEFCCFPACTGCY

SEQ ID NO: 3339 - protein, 14 aa, Artificial Sequence
  Synthetically generated peptide
CCEFCCWPACTGCY

SEQ ID NO: 3340 - protein, 14 aa, Artificial Sequence
  Synthetically generated peptide
CCEFCCGPACTGCY

SEQ ID NO: 3341 - protein, 14 aa, Artificial Sequence
  Synthetically generated peptide
CCEFCCSPACTGCY

SEQ ID NO: 3342 - protein, 14 aa, Artificial Sequence
  Synthetically generated peptide
CCEFCCTPACTGCY

SEQ ID NO: 3343 - protein, 14 aa, Artificial Sequence
  Synthetically generated peptide
CCEFCCCPACTGCY

SEQ ID NO: 3344 - protein, 14 aa, Artificial Sequence
  Synthetically generated peptide
CCEFCCQPACTGCY

SEQ ID NO: 3345 - protein, 14 aa, Artificial Sequence
  Synthetically generated peptide
CCEFCCYPACTGCY

SEQ ID NO: 3346 - protein, 14 aa, Artificial Sequence
  Synthetically generated peptide
CCEFCCDPACTGCY

SEQ ID NO: 3347 - protein, 14 aa, Artificial Sequence
  Synthetically generated peptide
CCEFCCEPACTGCY

SEQ ID NO: 3348 - protein, 14 aa, Artificial Sequence
  Synthetically generated peptide
CCEFCCKPACTGCY

SEQ ID NO: 3349 - protein, 14 aa, Artificial Sequence
  Synthetically generated peptide
CCEFCCRPACTGCY

SEQ ID NO: 3350 - protein, 14 aa, Artificial Sequence
  Synthetically generated peptide
CCEFCCHPACTGCY

SEQ ID NO: 3351 - protein, 13 aa, Artificial Sequence
  Synthetically generated peptide
CCEFCCAPACTGC

SEQ ID NO: 3352 - protein, 13 aa, Artificial Sequence
  Synthetically generated peptide
CCEFCCVPACTGC

SEQ ID NO: 3353 - protein, 13 aa, Artificial Sequence
  Synthetically generated peptide
CCEFCCLPACTGC

SEQ ID NO: 3354 - protein, 13 aa, Artificial Sequence
  Synthetically generated peptide
CCEFCCIPACTGC

SEQ ID NO: 3355 - protein, 13 aa, Artificial Sequence
  Synthetically generated peptide
CCEFCCPPACTGC

SEQ ID NO: 3356 - protein, 13 aa, Artificial Sequence
  Synthetically generated peptide
CCEFCCMPACTGC

SEQ ID NO: 3357 - protein, 13 aa, Artificial Sequence
  Synthetically generated peptide
CCEFCCFPACTGC

SEQ ID NO: 3358 - protein, 13 aa, Artificial Sequence
  Synthetically generated peptide
CCEFCCWPACTGC

SEQ ID NO: 3359 - protein, 13 aa, Artificial Sequence
  Synthetically generated peptide
CCEFCCGPACTGC

SEQ ID NO: 3360 - protein, 13 aa, Artificial Sequence
  Synthetically generated peptide
CCEFCCSPACTGC

SEQ ID NO: 3361 - protein, 13 aa, Artificial Sequence
  Synthetically generated peptide
CCEFCCTPACTGC

SEQ ID NO: 3362 - protein, 13 aa, Artificial Sequence
  Synthetically generated peptide
CCEFCCCPACTGC

SEQ ID NO: 3363 - protein, 13 aa, Artificial Sequence
  Synthetically generated peptide
CCEFCCQPACTGC

SEQ ID NO: 3364 - protein, 13 aa, Artificial Sequence
  Synthetically generated peptide
CCEFCCYPACTGC

SEQ ID NO: 3365 - protein, 13 aa, Artificial Sequence
  Synthetically generated peptide
CCEFCCDPACTGC

SEQ ID NO: 3366 - protein, 13 aa, Artificial Sequence
  Synthetically generated peptide
CCEFCCEPACTGC

SEQ ID NO: 3367 - protein, 13 aa, Artificial Sequence
  Synthetically generated peptide
CCEFCCKPACTGC

SEQ ID NO: 3368 - protein, 13 aa, Artificial Sequence
  Synthetically generated peptide
CCEFCCRPACTGC

SEQ ID NO: 3369 - protein, 13 aa, Artificial Sequence
  Synthetically generated peptide
CCEFCCHPACTGC

SEQ ID NO: 3370 - protein, 14 aa, Artificial Sequence
  Synthetically generated peptide
CCEWCCAPACTGCY

SEQ ID NO: 3371 - protein, 14 aa, Artificial Sequence
  Synthetically generated peptide
CCEWCCVPACTGCY

SEQ ID NO: 3372 - protein, 14 aa, Artificial Sequence
  Synthetically generated peptide
CCEWCCLPACTGCY

SEQ ID NO: 3373 - protein, 14 aa, Artificial Sequence
  Synthetically generated peptide
CCEWCCIPACTGCY

SEQ ID NO: 3374 - protein, 14 aa, Artificial Sequence
  Synthetically generated peptide
CCEWCCPPACTGCY

SEQ ID NO: 3375 - protein, 14 aa, Artificial Sequence
  Synthetically generated peptide
CCEWCCMPACTGCY

SEQ ID NO: 3376 - protein, 14 aa, Artificial Sequence
  Synthetically generated peptide
CCEWCCFPACTGCY

SEQ ID NO: 3377 - protein, 14 aa, Artificial Sequence
  Synthetically generated peptide
CCEWCCWPACTGCY

SEQ ID NO: 3378 - protein, 14 aa, Artificial Sequence
  Synthetically generated peptide
CCEWCCGPACTGCY

SEQ ID NO: 3379 - protein, 14 aa, Artificial Sequence
  Synthetically generated peptide
CCEWCCSPACTGCY

SEQ ID NO: 3380 - protein, 14 aa, Artificial Sequence
  Synthetically generated peptide
CCEWCCTPACTGCY

SEQ ID NO: 3381 - protein, 14 aa, Artificial Sequence
  Synthetically generated peptide
CCEWCCCPACTGCY

SEQ ID NO: 3382 - protein, 14 aa, Artificial Sequence
  Synthetically generated peptide
CCEWCCQPACTGCY

SEQ ID NO: 3383 - protein, 14 aa, Artificial Sequence
  Synthetically generated peptide
CCEWCCYPACTGCY

SEQ ID NO: 3384 - protein, 14 aa, Artificial Sequence
  Synthetically generated peptide
CCEWCCDPACTGCY

SEQ ID NO: 3385 - protein, 14 aa, Artificial Sequence
  Synthetically generated peptide
CCEWCCEPACTGCY

SEQ ID NO: 3386 - protein, 14 aa, Artificial Sequence
  Synthetically generated peptide
CCEWCCKPACTGCY

SEQ ID NO: 3387 - protein, 14 aa, Artificial Sequence
  Synthetically generated peptide
CCEWCCRPACTGCY

SEQ ID NO: 3388 - protein, 14 aa, Artificial Sequence
  Synthetically generated peptide
CCEWCCHPACTGCY

SEQ ID NO: 3389 - protein, 13 aa, Artificial Sequence
  Synthetically generated peptide
CCEWCCAPACTGC

SEQ ID NO: 3390 - protein, 13 aa, Artificial Sequence
  Synthetically generated peptide
CCEWCCVPACTGC

SEQ ID NO: 3391 - protein, 13 aa, Artificial Sequence
  Synthetically generated peptide
CCEWCCLPACTGC

SEQ ID NO: 3392 - protein, 13 aa, Artificial Sequence
  Synthetically generated peptide
CCEWCCIPACTGC

SEQ ID NO: 3393 - protein, 13 aa, Artificial Sequence
  Synthetically generated peptide
CCEWCCPPACTGC

SEQ ID NO: 3394 - protein, 13 aa, Artificial Sequence
  Synthetically generated peptide
CCEWCCMPACTGC

SEQ ID NO: 3395 - protein, 13 aa, Artificial Sequence
  Synthetically generated peptide
CCEWCCFPACTGC

SEQ ID NO: 3396 - protein, 13 aa, Artificial Sequence
  Synthetically generated peptide
CCEWCCWPACTGC

SEQ ID NO: 3397 - protein, 13 aa, Artificial Sequence
  Synthetically generated peptide
CCEWCCGPACTGC

SEQ ID NO: 3398 - protein, 13 aa, Artificial Sequence
  Synthetically generated peptide
CCEWCCSPACTGC

SEQ ID NO: 3399 - protein, 13 aa, Artificial Sequence
  Synthetically generated peptide
CCEWCCTPACTGC

SEQ ID NO: 3400 - protein, 13 aa, Artificial Sequence
  Synthetically generated peptide
CCEWCCCPACTGC

SEQ ID NO: 3401 - protein, 13 aa, Artificial Sequence
  Synthetically generated peptide
CCEWCCQPACTGC

SEQ ID NO: 3402 - protein, 13 aa, Artificial Sequence
  Synthetically generated peptide
CCEWCCYPACTGC

SEQ ID NO: 3403 - protein, 13 aa, Artificial Sequence
  Synthetically generated peptide
CCEWCCDPACTGC

SEQ ID NO: 3404 - protein, 13 aa, Artificial Sequence
  Synthetically generated peptide
CCEWCCEPACTGC

SEQ ID NO: 3405 - protein, 13 aa, Artificial Sequence
  Synthetically generated peptide
CCEWCCKPACTGC

SEQ ID NO: 3406 - protein, 13 aa, Artificial Sequence
  Synthetically generated peptide
CCEWCCRPACTGC

SEQ ID NO: 3407 - protein, 13 aa, Artificial Sequence
  Synthetically generated peptide
CCEWCCHPACTGC

SEQ ID NO: 3408 - protein, 14 aa, Artificial Sequence
  Synthetically generated peptide
CCEWCCNPACTGCA

SEQ ID NO: 3409 - protein, 14 aa, Artificial Sequence
  Synthetically generated peptide
CCEWCCNPACTGCV

SEQ ID NO: 3410 - protein, 14 aa, Artificial Sequence
  Synthetically generated peptide
CCEWCCNPACTGCL

SEQ ID NO: 3411 - protein, 14 aa, Artificial Sequence
  Synthetically generated peptide
CCEWCCNPACTGCI

SEQ ID NO: 3412 - protein, 14 aa, Artificial Sequence
  Synthetically generated peptide
CCEWCCNPACTGCP

SEQ ID NO: 3413 - protein, 14 aa, Artificial Sequence
  Synthetically generated peptide
CCEWCCNPACTGCM

SEQ ID NO: 3414 - protein, 14 aa, Artificial Sequence
  Synthetically generated peptide
CCEWCCNPACTGCF

SEQ ID NO: 3415 - protein, 14 aa, Artificial Sequence
  Synthetically generated peptide
CCEWCCNPACTGCW

SEQ ID NO: 3416 - protein, 14 aa, Artificial Sequence
  Synthetically generated peptide
CCEWCCNPACTGCG

SEQ ID NO: 3417 - protein, 14 aa, Artificial Sequence
  Synthetically generated peptide
CCEWCCNPACTGCS

SEQ ID NO: 3418 - protein, 14 aa, Artificial Sequence
  Synthetically generated peptide
CCEWCCNPACTGCT

SEQ ID NO: 3419 - protein, 14 aa, Artificial Sequence
  Synthetically generated peptide
CCEWCCNPACTGCC

SEQ ID NO: 3420 - protein, 14 aa, Artificial Sequence
  Synthetically generated peptide
CCEWCCNPACTGCN

SEQ ID NO: 3421 - protein, 14 aa, Artificial Sequence
  Synthetically generated peptide
CCEWCCNPACTGCQ

SEQ ID NO: 3422 - protein, 14 aa, Artificial Sequence
  Synthetically generated peptide
CCEWCCNPACTGCD

SEQ ID NO: 3423 - protein, 14 aa, Artificial Sequence
  Synthetically generated peptide
CCEWCCNPACTGCE

SEQ ID NO: 3424 - protein, 14 aa, Artificial Sequence
  Synthetically generated peptide
CCEWCCNPACTGCK

SEQ ID NO: 3425 - protein, 14 aa, Artificial Sequence
  Synthetically generated peptide
CCEWCCNPACTGCR

SEQ ID NO: 3426 - protein, 14 aa, Artificial Sequence
  Synthetically generated peptide
CCEWCCNPACTGCH

SEQ ID NO: 3427 - protein, 14 aa, Artificial Sequence
  Synthetically generated peptide
CCEFCCNPACTGCA

SEQ ID NO: 3428 - protein, 14 aa, Artificial Sequence
  Synthetically generated peptide
CCEFCCNPACTGCV

SEQ ID NO: 3429 - protein, 14 aa, Artificial Sequence
  Synthetically generated peptide
CCEFCCNPACTGCL

SEQ ID NO: 3430 - protein, 14 aa, Artificial Sequence
  Synthetically generated peptide
CCEFCCNPACTGCI

SEQ ID NO: 3431 - protein, 14 aa, Artificial Sequence
  Synthetically generated peptide
CCEFCCNPACTGCP

SEQ ID NO: 3432 - protein, 14 aa, Artificial Sequence
  Synthetically generated peptide
CCEFCCNPACTGCM

SEQ ID NO: 3433 - protein, 14 aa, Artificial Sequence
  Synthetically generated peptide
CCEFCCNPACTGCF

SEQ ID NO: 3434 - protein, 14 aa, Artificial Sequence
  Synthetically generated peptide
CCEFCCNPACTGCW

SEQ ID NO: 3435 - protein, 14 aa, Artificial Sequence
  Synthetically generated peptide
CCEFCCNPACTGCG

SEQ ID NO: 3436 - protein, 14 aa, Artificial Sequence
  Synthetically generated peptide
CCEFCCNPACTGCS

SEQ ID NO: 3437 - protein, 14 aa, Artificial Sequence
  Synthetically generated peptide
CCEFCCNPACTGCT

SEQ ID NO: 3438 - protein, 14 aa, Artificial Sequence
  Synthetically generated peptide
CCEFCCNPACTGCC

SEQ ID NO: 3439 - protein, 14 aa, Artificial Sequence
  Synthetically generated peptide
CCEFCCNPACTGCN

SEQ ID NO: 3440 - protein, 14 aa, Artificial Sequence
  Synthetically generated peptide
CCEFCCNPACTGCQ

SEQ ID NO: 3441 - protein, 14 aa, Artificial Sequence
  Synthetically generated peptide
CCEFCCNPACTGCD

SEQ ID NO: 3442 - protein, 14 aa, Artificial Sequence
  Synthetically generated peptide
CCEFCCNPACTGCE

SEQ ID NO: 3443 - protein, 14 aa, Artificial Sequence
  Synthetically generated peptide
CCEFCCNPACTGCK

SEQ ID NO: 3444 - protein, 14 aa, Artificial Sequence
  Synthetically generated peptide
CCEFCCNPACTGCR

SEQ ID NO: 3445 - protein, 14 aa, Artificial Sequence
  Synthetically generated peptide
CCEFCCNPACTGCH

SEQ ID NO: 3446 - protein, 14 aa, Artificial Sequence
  Synthetically generated peptide
CCAFCCNPACTGCY

SEQ ID NO: 3447 - protein, 14 aa, Artificial Sequence
  Synthetically generated peptide
CCVFCCNPACTGCY

SEQ ID NO: 3448 - protein, 14 aa, Artificial Sequence
  Synthetically generated peptide
CCLFCCNPACTGCY

SEQ ID NO: 3449 - protein, 14 aa, Artificial Sequence
  Synthetically generated peptide
CCIFCCNPACTGCY

SEQ ID NO: 3450 - protein, 14 aa, Artificial Sequence
  Synthetically generated peptide
CCMFCCNPACTGCY

SEQ ID NO: 3451 - protein, 14 aa, Artificial Sequence
  Synthetically generated peptide
CCFFCCNPACTGCY

SEQ ID NO: 3452 - protein, 14 aa, Artificial Sequence
  Synthetically generated peptide
CCWFCCNPACTGCY

SEQ ID NO: 3453 - protein, 14 aa, Artificial Sequence
  Synthetically generated peptide
CCGFCCNPACTGCY

SEQ ID NO: 3454 - protein, 14 aa, Artificial Sequence
  Synthetically generated peptide
CCSFCCNPACTGCY

SEQ ID NO: 3455 - protein, 14 aa, Artificial Sequence
  Synthetically generated peptide
CCTFCCNPACTGCY

SEQ ID NO: 3456 - protein, 14 aa, Artificial Sequence
  Synthetically generated peptide
CCCFCCNPACTGCY

SEQ ID NO: 3457 - protein, 14 aa, Artificial Sequence
  Synthetically generated peptide
CCNFCCNPACTGCY

SEQ ID NO: 3458 - protein, 14 aa, Artificial Sequence
  Synthetically generated peptide
CCQFCCNPACTGCY

SEQ ID NO: 3459 - protein, 14 aa, Artificial Sequence
  Synthetically generated peptide
CCYFCCNPACTGCY

SEQ ID NO: 3460 - protein, 14 aa, Artificial Sequence
  Synthetically generated peptide
CCDFCCNPACTGCY

SEQ ID NO: 3461 - protein, 14 aa, Artificial Sequence
  Synthetically generated peptide
CCKFCCNPACTGCY

SEQ ID NO: 3462 - protein, 14 aa, Artificial Sequence
  Synthetically generated peptide
CCRFCCNPACTGCY

SEQ ID NO: 3463 - protein, 14 aa, Artificial Sequence
  Synthetically generated peptide
CCHFCCNPACTGCY

SEQ ID NO: 3464 - protein, 13 aa, Artificial Sequence
  Synthetically generated peptide
CCAFCCNPACTGC

SEQ ID NO: 3465 - protein, 13 aa, Artificial Sequence
  Synthetically generated peptide
CCVFCCNPACTGC

SEQ ID NO: 3466 - protein, 13 aa, Artificial Sequence
  Synthetically generated peptide
CCLFCCNPACTGC

SEQ ID NO: 3467 - protein, 13 aa, Artificial Sequence
  Synthetically generated peptide
CCIFCCNPACTGC

SEQ ID NO: 3468 - protein, 13 aa, Artificial Sequence
  Synthetically generated peptide
CCMFCCNPACTGC

SEQ ID NO: 3469 - protein, 13 aa, Artificial Sequence
  Synthetically generated peptide
CCFFCCNPACTGC

SEQ ID NO: 3470 - protein, 13 aa, Artificial Sequence
  Synthetically generated peptide
CCWFCCNPACTGC

SEQ ID NO: 3471 - protein, 13 aa, Artificial Sequence
  Synthetically generated peptide
CCGFCCNPACTGC

SEQ ID NO: 3472 - protein, 13 aa, Artificial Sequence
  Synthetically generated peptide
CCSFCCNPACTGC

SEQ ID NO: 3473 - protein, 13 aa, Artificial Sequence
  Synthetically generated peptide
CCTFCCNPACTGC

SEQ ID NO: 3474 - protein, 13 aa, Artificial Sequence
  Synthetically generated peptide
CCCFCCNPACTGC

SEQ ID NO: 3475 - protein, 13 aa, Artificial Sequence
  Synthetically generated peptide
CCNFCCNPACTGC

SEQ ID NO: 3476 - protein, 13 aa, Artificial Sequence
  Synthetically generated peptide
CCQFCCNPACTGC

SEQ ID NO: 3477 - protein, 13 aa, Artificial Sequence
  Synthetically generated peptide
CCYFCCNPACTGC

SEQ ID NO: 3478 - protein, 13 aa, Artificial Sequence
  Synthetically generated peptide
CCDFCCNPACTGC

SEQ ID NO: 3479 - protein, 13 aa, Artificial Sequence
  Synthetically generated peptide
CCKFCCNPACTGC

SEQ ID NO: 3480 - protein, 13 aa, Artificial Sequence
  Synthetically generated peptide
CCRFCCNPACTGC

SEQ ID NO: 3481 - protein, 13 aa, Artificial Sequence
  Synthetically generated peptide
CCHFCCNPACTGC

SEQ ID NO: 3482 - protein, 14 aa, Artificial Sequence
  Synthetically generated peptide
CCAWCCNPACTGCY

SEQ ID NO: 3483 - protein, 14 aa, Artificial Sequence
  Synthetically generated peptide
CCVWCCNPACTGCY

SEQ ID NO: 3484 - protein, 14 aa, Artificial Sequence
  Synthetically generated peptide
CCLWCCNPACTGCY

SEQ ID NO: 3485 - protein, 14 aa, Artificial Sequence
  Synthetically generated peptide
CCIWCCNPACTGCY

SEQ ID NO: 3486 - protein, 14 aa, Artificial Sequence
  Synthetically generated peptide
CCMWCCNPACTGCY

SEQ ID NO: 3487 - protein, 14 aa, Artificial Sequence
  Synthetically generated peptide
CCFWCCNPACTGCY

SEQ ID NO: 3488 - protein, 14 aa, Artificial Sequence
  Synthetically generated peptide
CCWWCCNPACTGCY

SEQ ID NO: 3489 - protein, 14 aa, Artificial Sequence
  Synthetically generated peptide
CCGWCCNPACTGCY

SEQ ID NO: 3490 - protein, 14 aa, Artificial Sequence
  Synthetically generated peptide
CCSWCCNPACTGCY

SEQ ID NO: 3491 - protein, 14 aa, Artificial Sequence
  Synthetically generated peptide
CCTWCCNPACTGCY

SEQ ID NO: 3492 - protein, 14 aa, Artificial Sequence
  Synthetically generated peptide
CCCWCCNPACTGCY

SEQ ID NO: 3493 - protein, 14 aa, Artificial Sequence
  Synthetically generated peptide
CCNWCCNPACTGCY

SEQ ID NO: 3494 - protein, 14 aa, Artificial Sequence
  Synthetically generated peptide
CCQWCCNPACTGCY

SEQ ID NO: 3495 - protein, 14 aa, Artificial Sequence
  Synthetically generated peptide
CCYWCCNPACTGCY

SEQ ID NO: 3496 - protein, 14 aa, Artificial Sequence
  Synthetically generated peptide
CCDWCCNPACTGCY

SEQ ID NO: 3497 - protein, 14 aa, Artificial Sequence
  Synthetically generated peptide
CCKWCCNPACTGCY

SEQ ID NO: 3498 - protein, 14 aa, Artificial Sequence
  Synthetically generated peptide
CCRWCCNPACTGCY

SEQ ID NO: 3499 - protein, 14 aa, Artificial Sequence
  Synthetically generated peptide
CCHWCCNPACTGCY

SEQ ID NO: 3500 - protein, 13 aa, Artificial Sequence
  Synthetically generated peptide
CCAWCCNPACTGC

SEQ ID NO: 3501 - protein, 13 aa, Artificial Sequence
  Synthetically generated peptide
CCVWCCNPACTGC

SEQ ID NO: 3502 - protein, 13 aa, Artificial Sequence
  Synthetically generated peptide
CCLWCCNPACTGC

SEQ ID NO: 3503 - protein, 13 aa, Artificial Sequence
  Synthetically generated peptide
CCIWCCNPACTGC

SEQ ID NO: 3504 - protein, 13 aa, Artificial Sequence
  Synthetically generated peptide
CCMWCCNPACTGC

SEQ ID NO: 3505 - protein, 13 aa, Artificial Sequence
  Synthetically generated peptide
CCFWCCNPACTGC

SEQ ID NO: 3506 - protein, 13 aa, Artificial Sequence
  Synthetically generated peptide
CCWWCCNPACTGC

SEQ ID NO: 3507 - protein, 13 aa, Artificial Sequence
  Synthetically generated peptide
CCGWCCNPACTGC

SEQ ID NO: 3508 - protein, 13 aa, Artificial Sequence
  Synthetically generated peptide
CCSWCCNPACTGC

SEQ ID NO: 3509 - protein, 13 aa, Artificial Sequence
  Synthetically generated peptide
CCTWCCNPACTGC

SEQ ID NO: 3510 - protein, 13 aa, Artificial Sequence
  Synthetically generated peptide
CCCWCCNPACTGC

SEQ ID NO: 3511 - protein, 13 aa, Artificial Sequence
  Synthetically generated peptide
CCNWCCNPACTGC

SEQ ID NO: 3512 - protein, 13 aa, Artificial Sequence
  Synthetically generated peptide
CCQWCCNPACTGC

SEQ ID NO: 3513 - protein, 13 aa, Artificial Sequence
  Synthetically generated peptide
CCYWCCNPACTGC

SEQ ID NO: 3514 - protein, 13 aa, Artificial Sequence
  Synthetically generated peptide
CCDWCCNPACTGC

SEQ ID NO: 3515 - protein, 13 aa, Artificial Sequence
  Synthetically generated peptide
CCKWCCNPACTGC

SEQ ID NO: 3516 - protein, 13 aa, Artificial Sequence
  Synthetically generated peptide
CCRWCCNPACTGC

SEQ ID NO: 3517 - protein, 13 aa, Artificial Sequence
  Synthetically generated peptide
CCHWCCNPACTGC

SEQ ID NO: 3518 - protein, 20 aa, Artificial Sequence
  Synthetically generated peptide
GNLIDCCEICCNPACFGCLN

SEQ ID NO: 3519 - protein, 20 aa, Artificial Sequence
  Synthetically generated peptide
GNLIDRCEICCNPACFGCLN

SEQ ID NO: 3520 - protein, 23 aa, Artificial Sequence
  Synthetically generated peptide
PPAEVSSDWDCCDVCCNPACAGC

SEQ ID NO: 3521 - protein, 65 aa, Artificial Sequence
  Synthetically generated peptide
  VARIANT (2)..(5): Xaa = any amino acid (natural or non-natural), the same or diferent
  misc_feature (7)..(10): Xaa can be any naturally occurring amino acid
  misc_feature (12)..(15): Xaa can be any naturally occurring amino acid
  misc_feature (17)..(20): Xaa can be any naturally occurring amino acid
  misc_feature (22)..(25): Xaa can be any naturally occurring amino acid
  misc_feature (27)..(30): Xaa can be any naturally occurring amino acid
  misc_feature (32)..(35): Xaa can be any naturally occurring amino acid
  misc_feature (37)..(40): Xaa can be any naturally occurring amino acid
  misc_feature (42)..(45): Xaa can be any naturally occurring amino acid
  misc_feature (47)..(50): Xaa can be any naturally occurring amino acid
  misc_feature (52)..(55): Xaa can be any naturally occurring amino acid
  misc_feature (57)..(60): Xaa can be any naturally occurring amino acid
  misc_feature (62)..(65): Xaa can be any naturally occurring amino acid
CXXXXEXXXXYXXXXCXXXXCXXXXNXXXXPXXXXAXXXXCXXXXTXXXXGXXXXCXXXXYXXXX

SEQ ID NO: 3522 - protein, 16 aa, Artificial Sequence
  Synthetically generated peptide
NYCCELCCNPACTGCF

SEQ ID NO: 3523 - protein, 13 aa, Artificial Sequence
  Synthetically generated peptide
ACEACANPACTGC

SEQ ID NO: 3524 - protein, 13 aa, Artificial Sequence
  Synthetically generated peptide
ACERCANPACTGC

SEQ ID NO: 3525 - protein, 13 aa, Artificial Sequence
  Synthetically generated peptide
ACENCANPACTGC

SEQ ID NO: 3526 - protein, 13 aa, Artificial Sequence
  Synthetically generated peptide
ACEDCANPACTGC

SEQ ID NO: 3527 - protein, 13 aa, Artificial Sequence
  Synthetically generated peptide
ACECCANPACTGC

SEQ ID NO: 3528 - protein, 13 aa, Artificial Sequence
  Synthetically generated peptide
ACEQCANPACTGC

SEQ ID NO: 3529 - protein, 13 aa, Artificial Sequence
  Synthetically generated peptide
ACEECANPACTGC

SEQ ID NO: 3530 - protein, 13 aa, Artificial Sequence
  Synthetically generated peptide
ACEGCANPACTGC

SEQ ID NO: 3531 - protein, 13 aa, Artificial Sequence
  Synthetically generated peptide
ACEHCANPACTGC

SEQ ID NO: 3532 - protein, 13 aa, Artificial Sequence
  Synthetically generated peptide
ACEICANPACTGC

SEQ ID NO: 3533 - protein, 13 aa, Artificial Sequence
  Synthetically generated peptide
ACEKCANPACTGC

SEQ ID NO: 3534 - protein, 13 aa, Artificial Sequence
  Synthetically generated peptide
ACEMCANPACTGC

SEQ ID NO: 3535 - protein, 13 aa, Artificial Sequence
  Synthetically generated peptide
ACEFCANPACTGC

SEQ ID NO: 3536 - protein, 13 aa, Artificial Sequence
  Synthetically generated peptide
ACEPCANPACTGC

SEQ ID NO: 3537 - protein, 13 aa, Artificial Sequence
  Synthetically generated peptide
ACESCANPACTGC

SEQ ID NO: 3538 - protein, 13 aa, Artificial Sequence
  Synthetically generated peptide
ACETCANPACTGC

SEQ ID NO: 3539 - protein, 13 aa, Artificial Sequence
  Synthetically generated peptide
ACEWCANPACTGC

SEQ ID NO: 3540 - protein, 13 aa, Artificial Sequence
  Synthetically generated peptide
ACEYCANPACTGC

SEQ ID NO: 3541 - protein, 13 aa, Artificial Sequence
  Synthetically generated peptide
ACEVCANPACTGC

SEQ ID NO: 3542 - protein, 14 aa, Artificial Sequence
  Synthetically generated peptide
ACELCANPACTGCY

SEQ ID NO: 3543 - protein, 14 aa, Artificial Sequence
  Synthetically generated peptide
ACEACANPACTGCY

SEQ ID NO: 3544 - protein, 14 aa, Artificial Sequence
  Synthetically generated peptide
ACERCANPACTGCY

SEQ ID NO: 3545 - protein, 14 aa, Artificial Sequence
  Synthetically generated peptide
ACENCANPACTGCY

SEQ ID NO: 3546 - protein, 14 aa, Artificial Sequence
  Synthetically generated peptide
ACEDCANPACTGCY

SEQ ID NO: 3547 - protein, 14 aa, Artificial Sequence
  Synthetically generated peptide
ACECCANPACTGCY

SEQ ID NO: 3548 - protein, 14 aa, Artificial Sequence
  Synthetically generated peptide
ACEQCANPACTGCY

SEQ ID NO: 3549 - protein, 14 aa, Artificial Sequence
  Synthetically generated peptide
ACEECANPACTGCY

SEQ ID NO: 3550 - protein, 14 aa, Artificial Sequence
  Synthetically generated peptide
ACEGCANPACTGCY

SEQ ID NO: 3551 - protein, 14 aa, Artificial Sequence
  Synthetically generated peptide
ACEHCANPACTGCY

SEQ ID NO: 3552 - protein, 14 aa, Artificial Sequence
  Synthetically generated peptide
ACEICANPACTGCY

SEQ ID NO: 3553 - protein, 14 aa, Artificial Sequence
  Synthetically generated peptide
ACEKCANPACTGCY

SEQ ID NO: 3554 - protein, 14 aa, Artificial Sequence
  Synthetically generated peptide
ACEMCANPACTGCY

SEQ ID NO: 3555 - protein, 14 aa, Artificial Sequence
  Synthetically generated peptide
ACEFCANPACTGCY

SEQ ID NO: 3556 - protein, 14 aa, Artificial Sequence
  Synthetically generated peptide
ACEPCANPACTGCY

SEQ ID NO: 3557 - protein, 14 aa, Artificial Sequence
  Synthetically generated peptide
ACESCANPACTGCY

SEQ ID NO: 3558 - protein, 14 aa, Artificial Sequence
  Synthetically generated peptide
ACETCANPACTGCY

SEQ ID NO: 3559 - protein, 14 aa, Artificial Sequence
  Synthetically generated peptide
ACEWCANPACTGCY

SEQ ID NO: 3560 - protein, 14 aa, Artificial Sequence
  Synthetically generated peptide
ACEYCANPACTGCY

SEQ ID NO: 3561 - protein, 14 aa, Artificial Sequence
  Synthetically generated peptide
ACEVCANPACTGCY

SEQ ID NO: 3562 - protein, 13 aa, Artificial Sequence
  Synthetically generated peptide
ACELCCNPACTGC

SEQ ID NO: 3563 - protein, 13 aa, Artificial Sequence
  Synthetically generated peptide
ACEACCNPACTGC

SEQ ID NO: 3564 - protein, 13 aa, Artificial Sequence
  Synthetically generated peptide
ACERCCNPACTGC

SEQ ID NO: 3565 - protein, 13 aa, Artificial Sequence
  Synthetically generated peptide
ACENCCNPACTGC

SEQ ID NO: 3566 - protein, 13 aa, Artificial Sequence
  Synthetically generated peptide
ACEDCCNPACTGC

SEQ ID NO: 3567 - protein, 13 aa, Artificial Sequence
  Synthetically generated peptide
ACECCCNPACTGC

SEQ ID NO: 3568 - protein, 13 aa, Artificial Sequence
  Synthetically generated peptide
ACEQCCNPACTGC

SEQ ID NO: 3569 - protein, 13 aa, Artificial Sequence
  Synthetically generated peptide
ACEECCNPACTGC

SEQ ID NO: 3570 - protein, 13 aa, Artificial Sequence
  Synthetically generated peptide
ACEGCCNPACTGC

SEQ ID NO: 3571 - protein, 13 aa, Artificial Sequence
  Synthetically generated peptide
ACEHCCNPACTGC

SEQ ID NO: 3572 - protein, 13 aa, Artificial Sequence
  Synthetically generated peptide
ACEICCNPACTGC

SEQ ID NO: 3573 - protein, 13 aa, Artificial Sequence
  Synthetically generated peptide
ACEKCCNPACTGC

SEQ ID NO: 3574 - protein, 13 aa, Artificial Sequence
  Synthetically generated peptide
ACEMCCNPACTGC

SEQ ID NO: 3575 - protein, 13 aa, Artificial Sequence
  Synthetically generated peptide
ACEFCCNPACTGC

SEQ ID NO: 3576 - protein, 13 aa, Artificial Sequence
  Synthetically generated peptide
ACEPCCNPACTGC

SEQ ID NO: 3577 - protein, 13 aa, Artificial Sequence
  Synthetically generated peptide
ACESCCNPACTGC

SEQ ID NO: 3578 - protein, 13 aa, Artificial Sequence
  Synthetically generated peptide
ACETCCNPACTGC

SEQ ID NO: 3579 - protein, 13 aa, Artificial Sequence
  Synthetically generated peptide
ACEWCCNPACTGC

SEQ ID NO: 3580 - protein, 13 aa, Artificial Sequence
  Synthetically generated peptide
ACEYCCNPACTGC

SEQ ID NO: 3581 - protein, 13 aa, Artificial Sequence
  Synthetically generated peptide
ACEVCCNPACTGC

SEQ ID NO: 3582 - protein, 14 aa, Artificial Sequence
  Synthetically generated peptide
ACELCCNPACTGCY

SEQ ID NO: 3583 - protein, 14 aa, Artificial Sequence
  Synthetically generated peptide
ACEACCNPACTGCY

SEQ ID NO: 3584 - protein, 14 aa, Artificial Sequence
  Synthetically generated peptide
ACERCCNPACTGCY

SEQ ID NO: 3585 - protein, 14 aa, Artificial Sequence
  Synthetically generated peptide
ACENCCNPACTGCY

SEQ ID NO: 3586 - protein, 14 aa, Artificial Sequence
  Synthetically generated peptide
ACEDCCNPACTGCY

SEQ ID NO: 3587 - protein, 14 aa, Artificial Sequence
  Synthetically generated peptide
ACECCCNPACTGCY

SEQ ID NO: 3588 - protein, 14 aa, Artificial Sequence
  Synthetically generated peptide
ACEQCCNPACTGCY

SEQ ID NO: 3589 - protein, 14 aa, Artificial Sequence
  Synthetically generated peptide
ACEECCNPACTGCY

SEQ ID NO: 3590 - protein, 14 aa, Artificial Sequence
  Synthetically generated peptide
ACEGCCNPACTGCY

SEQ ID NO: 3591 - protein, 14 aa, Artificial Sequence
  Synthetically generated peptide
ACEHCCNPACTGCY

SEQ ID NO: 3592 - protein, 14 aa, Artificial Sequence
  Synthetically generated peptide
ACEICCNPACTGCY

SEQ ID NO: 3593 - protein, 14 aa, Artificial Sequence
  Synthetically generated peptide
ACEKCCNPACTGCY

SEQ ID NO: 3594 - protein, 14 aa, Artificial Sequence
  Synthetically generated peptide
ACEMCCNPACTGCY

SEQ ID NO: 3595 - protein, 14 aa, Artificial Sequence
  Synthetically generated peptide
ACEFCCNPACTGCY

SEQ ID NO: 3596 - protein, 14 aa, Artificial Sequence
  Synthetically generated peptide
ACEPCCNPACTGCY

SEQ ID NO: 3597 - protein, 14 aa, Artificial Sequence
  Synthetically generated peptide
ACESCCNPACTGCY

SEQ ID NO: 3598 - protein, 14 aa, Artificial Sequence
  Synthetically generated peptide
ACETCCNPACTGCY

SEQ ID NO: 3599 - protein, 14 aa, Artificial Sequence
  Synthetically generated peptide
ACEWCCNPACTGCY

SEQ ID NO: 3600 - protein, 14 aa, Artificial Sequence
  Synthetically generated peptide
ACEYCCNPACTGCY

SEQ ID NO: 3601 - protein, 14 aa, Artificial Sequence
  Synthetically generated peptide
ACEVCCNPACTGCY

SEQ ID NO: 3602 - protein, 13 aa, Artificial Sequence
  Synthetically generated peptide
CCELCANPACTGC

SEQ ID NO: 3603 - protein, 13 aa, Artificial Sequence
  Synthetically generated peptide
CCEACANPACTGC

SEQ ID NO: 3604 - protein, 13 aa, Artificial Sequence
  Synthetically generated peptide
CCERCANPACTGC

SEQ ID NO: 3605 - protein, 13 aa, Artificial Sequence
  Synthetically generated peptide
CCENCANPACTGC

SEQ ID NO: 3606 - protein, 13 aa, Artificial Sequence
  Synthetically generated peptide
CCEDCANPACTGC

SEQ ID NO: 3607 - protein, 13 aa, Artificial Sequence
  Synthetically generated peptide
CCECCANPACTGC

SEQ ID NO: 3608 - protein, 13 aa, Artificial Sequence
  Synthetically generated peptide
CCEQCANPACTGC

SEQ ID NO: 3609 - protein, 13 aa, Artificial Sequence
  Synthetically generated peptide
CCEECANPACTGC

SEQ ID NO: 3610 - protein, 13 aa, Artificial Sequence
  Synthetically generated peptide
CCEGCANPACTGC

SEQ ID NO: 3611 - protein, 13 aa, Artificial Sequence
  Synthetically generated peptide
CCEHCANPACTGC

SEQ ID NO: 3612 - protein, 13 aa, Artificial Sequence
  Synthetically generated peptide
CCEICANPACTGC

SEQ ID NO: 3613 - protein, 13 aa, Artificial Sequence
  Synthetically generated peptide
CCEKCANPACTGC

SEQ ID NO: 3614 - protein, 13 aa, Artificial Sequence
  Synthetically generated peptide
CCEMCANPACTGC

SEQ ID NO: 3615 - protein, 13 aa, Artificial Sequence
  Synthetically generated peptide
CCEFCANPACTGC

SEQ ID NO: 3616 - protein, 13 aa, Artificial Sequence
  Synthetically generated peptide
CCEPCANPACTGC

SEQ ID NO: 3617 - protein, 13 aa, Artificial Sequence
  Synthetically generated peptide
CCESCANPACTGC

SEQ ID NO: 3618 - protein, 13 aa, Artificial Sequence
  Synthetically generated peptide
CCETCANPACTGC

SEQ ID NO: 3619 - protein, 13 aa, Artificial Sequence
  Synthetically generated peptide
CCEWCANPACTGC

SEQ ID NO: 3620 - protein, 13 aa, Artificial Sequence
  Synthetically generated peptide
CCEYCANPACTGC

SEQ ID NO: 3621 - protein, 13 aa, Artificial Sequence
  Synthetically generated peptide
CCEVCANPACTGC

SEQ ID NO: 3622 - protein, 14 aa, Artificial Sequence
  Synthetically generated peptide
CCELCANPACTGCY

SEQ ID NO: 3623 - protein, 14 aa, Artificial Sequence
  Synthetically generated peptide
CCEACANPACTGCY

SEQ ID NO: 3624 - protein, 14 aa, Artificial Sequence
  Synthetically generated peptide
CCERCANPACTGCY

SEQ ID NO: 3625 - protein, 14 aa, Artificial Sequence
  Synthetically generated peptide
CCENCANPACTGCY

SEQ ID NO: 3626 - protein, 14 aa, Artificial Sequence
  Synthetically generated peptide
CCEDCANPACTGCY

SEQ ID NO: 3627 - protein, 14 aa, Artificial Sequence
  Synthetically generated peptide
CCECCANPACTGCY

SEQ ID NO: 3628 - protein, 14 aa, Artificial Sequence
  Synthetically generated peptide
CCEQCANPACTGCY

SEQ ID NO: 3629 - protein, 14 aa, Artificial Sequence
  Synthetically generated peptide
CCEECANPACTGCY

SEQ ID NO: 3630 - protein, 14 aa, Artificial Sequence
  Synthetically generated peptide
CCEGCANPACTGCY

SEQ ID NO: 3631 - protein, 14 aa, Artificial Sequence
  Synthetically generated peptide
CCEHCANPACTGCY

SEQ ID NO: 3632 - protein, 14 aa, Artificial Sequence
  Synthetically generated peptide
CCEICANPACTGCY

SEQ ID NO: 3633 - protein, 14 aa, Artificial Sequence
  Synthetically generated peptide
CCEKCANPACTGCY

SEQ ID NO: 3634 - protein, 14 aa, Artificial Sequence
  Synthetically generated peptide
CCEMCANPACTGCY

SEQ ID NO: 3635 - protein, 14 aa, Artificial Sequence
  Synthetically generated peptide
CCEFCANPACTGCY

SEQ ID NO: 3636 - protein, 14 aa, Artificial Sequence
  Synthetically generated peptide
CCEPCANPACTGCY

SEQ ID NO: 3637 - protein, 14 aa, Artificial Sequence
  Synthetically generated peptide
CCESCANPACTGCY

SEQ ID NO: 3638 - protein, 14 aa, Artificial Sequence
  Synthetically generated peptide
CCETCANPACTGCY

SEQ ID NO: 3639 - protein, 14 aa, Artificial Sequence
  Synthetically generated peptide
CCEWCANPACTGCY

SEQ ID NO: 3640 - protein, 14 aa, Artificial Sequence
  Synthetically generated peptide
CCEYCANPACTGCY

SEQ ID NO: 3641 - protein, 14 aa, Artificial Sequence
  Synthetically generated peptide
CCEVCANPACTGCY

SEQ ID NO: 3642 - protein, 13 aa, Artificial Sequence
  Synthetically generated peptide
GCELCGNPACTGC

SEQ ID NO: 3643 - protein, 13 aa, Artificial Sequence
  Synthetically generated peptide
GCEACGNPACTGC

SEQ ID NO: 3644 - protein, 13 aa, Artificial Sequence
  Synthetically generated peptide
GCERCGNPACTGC

SEQ ID NO: 3645 - protein, 13 aa, Artificial Sequence
  Synthetically generated peptide
GCENCGNPACTGC

SEQ ID NO: 3646 - protein, 13 aa, Artificial Sequence
  Synthetically generated peptide
GCEDCGNPACTGC

SEQ ID NO: 3647 - protein, 13 aa, Artificial Sequence
  Synthetically generated peptide
GCECCGNPACTGC

SEQ ID NO: 3648 - protein, 13 aa, Artificial Sequence
  Synthetically generated peptide
GCEQCGNPACTGC

SEQ ID NO: 3649 - protein, 13 aa, Artificial Sequence
  Synthetically generated peptide
GCEECGNPACTGC

SEQ ID NO: 3650 - protein, 13 aa, Artificial Sequence
  Synthetically generated peptide
GCEGCGNPACTGC

SEQ ID NO: 3651 - protein, 13 aa, Artificial Sequence
  Synthetically generated peptide
GCEHCGNPACTGC

SEQ ID NO: 3652 - protein, 13 aa, Artificial Sequence
  Synthetically generated peptide
GCEICGNPACTGC

SEQ ID NO: 3653 - protein, 13 aa, Artificial Sequence
  Synthetically generated peptide
GCEKCGNPACTGC

SEQ ID NO: 3654 - protein, 13 aa, Artificial Sequence
  Synthetically generated peptide
GCEMCGNPACTGC

SEQ ID NO: 3655 - protein, 13 aa, Artificial Sequence
  Synthetically generated peptide
GCEFCGNPACTGC

SEQ ID NO: 3656 - protein, 13 aa, Artificial Sequence
  Synthetically generated peptide
GCEPCGNPACTGC

SEQ ID NO: 3657 - protein, 13 aa, Artificial Sequence
  Synthetically generated peptide
GCESCGNPACTGC

SEQ ID NO: 3658 - protein, 13 aa, Artificial Sequence
  Synthetically generated peptide
GCETCGNPACTGC

SEQ ID NO: 3659 - protein, 13 aa, Artificial Sequence
  Synthetically generated peptide
GCEWCGNPACTGC

SEQ ID NO: 3660 - protein, 13 aa, Artificial Sequence
  Synthetically generated peptide
GCEYCGNPACTGC

SEQ ID NO: 3661 - protein, 13 aa, Artificial Sequence
  Synthetically generated peptide
GCEVCGNPACTGC

SEQ ID NO: 3662 - protein, 14 aa, Artificial Sequence
  Synthetically generated peptide
GCELCGNPACTGCY

SEQ ID NO: 3663 - protein, 14 aa, Artificial Sequence
  Synthetically generated peptide
GCEACGNPACTGCY

SEQ ID NO: 3664 - protein, 14 aa, Artificial Sequence
  Synthetically generated peptide
GCERCGNPACTGCY

SEQ ID NO: 3665 - protein, 14 aa, Artificial Sequence
  Synthetically generated peptide
GCENCGNPACTGCY

SEQ ID NO: 3666 - protein, 14 aa, Artificial Sequence
  Synthetically generated peptide
GCEDCGNPACTGCY

SEQ ID NO: 3667 - protein, 14 aa, Artificial Sequence
  Synthetically generated peptide
GCECCGNPACTGCY

SEQ ID NO: 3668 - protein, 14 aa, Artificial Sequence
  Synthetically generated peptide
GCEQCGNPACTGCY

SEQ ID NO: 3669 - protein, 14 aa, Artificial Sequence
  Synthetically generated peptide
GCEECGNPACTGCY

SEQ ID NO: 3670 - protein, 14 aa, Artificial Sequence
  Synthetically generated peptide
GCEGCGNPACTGCY

SEQ ID NO: 3671 - protein, 14 aa, Artificial Sequence
  Synthetically generated peptide
GCEHCGNPACTGCY

SEQ ID NO: 3672 - protein, 14 aa, Artificial Sequence
  Synthetically generated peptide
GCEICGNPACTGCY

SEQ ID NO: 3673 - protein, 14 aa, Artificial Sequence
  Synthetically generated peptide
GCEKCGNPACTGCY

SEQ ID NO: 3674 - protein, 14 aa, Artificial Sequence
  Synthetically generated peptide
GCEMCGNPACTGCY

SEQ ID NO: 3675 - protein, 14 aa, Artificial Sequence
  Synthetically generated peptide
GCEFCGNPACTGCY

SEQ ID NO: 3676 - protein, 14 aa, Artificial Sequence
  Synthetically generated peptide
GCEPCGNPACTGCY

SEQ ID NO: 3677 - protein, 14 aa, Artificial Sequence
  Synthetically generated peptide
GCESCGNPACTGCY

SEQ ID NO: 3678 - protein, 14 aa, Artificial Sequence
  Synthetically generated peptide
GCETCGNPACTGCY

SEQ ID NO: 3679 - protein, 14 aa, Artificial Sequence
  Synthetically generated peptide
GCEWCGNPACTGCY

SEQ ID NO: 3680 - protein, 14 aa, Artificial Sequence
  Synthetically generated peptide
GCEYCGNPACTGCY

SEQ ID NO: 3681 - protein, 14 aa, Artificial Sequence
  Synthetically generated peptide
GCEVCGNPACTGCY

SEQ ID NO: 3682 - protein, 13 aa, Artificial Sequence
  Synthetically generated peptide
GCELCCNPACTGC

SEQ ID NO: 3683 - protein, 13 aa, Artificial Sequence
  Synthetically generated peptide
GCEACCNPACTGC

SEQ ID NO: 3684 - protein, 13 aa, Artificial Sequence
  Synthetically generated peptide
GCERCCNPACTGC

SEQ ID NO: 3685 - protein, 13 aa, Artificial Sequence
  Synthetically generated peptide
GCENCCNPACTGC

SEQ ID NO: 3686 - protein, 13 aa, Artificial Sequence
  Synthetically generated peptide
GCEDCCNPACTGC

SEQ ID NO: 3687 - protein, 13 aa, Artificial Sequence
  Synthetically generated peptide
GCECCCNPACTGC

SEQ ID NO: 3688 - protein, 13 aa, Artificial Sequence
  Synthetically generated peptide
GCEQCCNPACTGC

SEQ ID NO: 3689 - protein, 13 aa, Artificial Sequence
  Synthetically generated peptide
GCEECCNPACTGC

SEQ ID NO: 3690 - protein, 13 aa, Artificial Sequence
  Synthetically generated peptide
GCEGCCNPACTGC

SEQ ID NO: 3691 - protein, 13 aa, Artificial Sequence
  Synthetically generated peptide
GCEHCCNPACTGC

SEQ ID NO: 3692 - protein, 13 aa, Artificial Sequence
  Synthetically generated peptide
GCEICCNPACTGC

SEQ ID NO: 3693 - protein, 13 aa, Artificial Sequence
  Synthetically generated peptide
GCEKCCNPACTGC

SEQ ID NO: 3694 - protein, 13 aa, Artificial Sequence
  Synthetically generated peptide
GCEMCCNPACTGC

SEQ ID NO: 3695 - protein, 13 aa, Artificial Sequence
  Synthetically generated peptide
GCEFCCNPACTGC

SEQ ID NO: 3696 - protein, 13 aa, Artificial Sequence
  Synthetically generated peptide
GCEPCCNPACTGC

SEQ ID NO: 3697 - protein, 13 aa, Artificial Sequence
  Synthetically generated peptide
GCESCCNPACTGC

SEQ ID NO: 3698 - protein, 13 aa, Artificial Sequence
  Synthetically generated peptide
GCETCCNPACTGC

SEQ ID NO: 3699 - protein, 13 aa, Artificial Sequence
  Synthetically generated peptide
GCEWCCNPACTGC

SEQ ID NO: 3700 - protein, 13 aa, Artificial Sequence
  Synthetically generated peptide
GCEYCCNPACTGC

SEQ ID NO: 3701 - protein, 13 aa, Artificial Sequence
  Synthetically generated peptide
GCEVCCNPACTGC

SEQ ID NO: 3702 - protein, 14 aa, Artificial Sequence
  Synthetically generated peptide
GCELCCNPACTGCY

SEQ ID NO: 3703 - protein, 14 aa, Artificial Sequence
  Synthetically generated peptide
GCEACCNPACTGCY

SEQ ID NO: 3704 - protein, 14 aa, Artificial Sequence
  Synthetically generated peptide
GCERCCNPACTGCY

SEQ ID NO: 3705 - protein, 14 aa, Artificial Sequence
  Synthetically generated peptide
GCENCCNPACTGCY

SEQ ID NO: 3706 - protein, 14 aa, Artificial Sequence
  Synthetically generated peptide
GCEDCCNPACTGCY

SEQ ID NO: 3707 - protein, 14 aa, Artificial Sequence
  Synthetically generated peptide
GCECCCNPACTGCY

SEQ ID NO: 3708 - protein, 14 aa, Artificial Sequence
  Synthetically generated peptide
GCEQCCNPACTGCY

SEQ ID NO: 3709 - protein, 14 aa, Artificial Sequence
  Synthetically generated peptide
GCEECCNPACTGCY

SEQ ID NO: 3710 - protein, 14 aa, Artificial Sequence
  Synthetically generated peptide
GCEGCCNPACTGCY

SEQ ID NO: 3711 - protein, 14 aa, Artificial Sequence
  Synthetically generated peptide
GCEHCCNPACTGCY

SEQ ID NO: 3712 - protein, 14 aa, Artificial Sequence
  Synthetically generated peptide
GCEICCNPACTGCY

SEQ ID NO: 3713 - protein, 14 aa, Artificial Sequence
  Synthetically generated peptide
GCEKCCNPACTGCY

SEQ ID NO: 3714 - protein, 14 aa, Artificial Sequence
  Synthetically generated peptide
GCEMCCNPACTGCY

SEQ ID NO: 3715 - protein, 14 aa, Artificial Sequence
  Synthetically generated peptide
GCEFCCNPACTGCY

SEQ ID NO: 3716 - protein, 14 aa, Artificial Sequence
  Synthetically generated peptide
GCEPCCNPACTGCY

SEQ ID NO: 3717 - protein, 14 aa, Artificial Sequence
  Synthetically generated peptide
GCESCCNPACTGCY

SEQ ID NO: 3718 - protein, 14 aa, Artificial Sequence
  Synthetically generated peptide
GCETCCNPACTGCY

SEQ ID NO: 3719 - protein, 14 aa, Artificial Sequence
  Synthetically generated peptide
GCEWCCNPACTGCY

SEQ ID NO: 3720 - protein, 14 aa, Artificial Sequence
  Synthetically generated peptide
GCEYCCNPACTGCY

SEQ ID NO: 3721 - protein, 14 aa, Artificial Sequence
  Synthetically generated peptide
GCEVCCNPACTGCY

SEQ ID NO: 3722 - protein, 13 aa, Artificial Sequence
  Synthetically generated peptide
CCELCGNPACTGC

SEQ ID NO: 3723 - protein, 13 aa, Artificial Sequence
  Synthetically generated peptide
CCEACGNPACTGC

SEQ ID NO: 3724 - protein, 13 aa, Artificial Sequence
  Synthetically generated peptide
CCERCGNPACTGC

SEQ ID NO: 3725 - protein, 13 aa, Artificial Sequence
  Synthetically generated peptide
CCENCGNPACTGC

SEQ ID NO: 3726 - protein, 13 aa, Artificial Sequence
  Synthetically generated peptide
CCEDCGNPACTGC

SEQ ID NO: 3727 - protein, 13 aa, Artificial Sequence
  Synthetically generated peptide
CCECCGNPACTGC

SEQ ID NO: 3728 - protein, 13 aa, Artificial Sequence
  Synthetically generated peptide
CCEQCGNPACTGC

SEQ ID NO: 3729 - protein, 13 aa, Artificial Sequence
  Synthetically generated peptide
CCEECGNPACTGC

SEQ ID NO: 3730 - protein, 13 aa, Artificial Sequence
  Synthetically generated peptide
CCEGCGNPACTGC

SEQ ID NO: 3731 - protein, 13 aa, Artificial Sequence
  Synthetically generated peptide
CCEHCGNPACTGC

SEQ ID NO: 3732 - protein, 13 aa, Artificial Sequence
  Synthetically generated peptide
CCEICGNPACTGC

SEQ ID NO: 3733 - protein, 13 aa, Artificial Sequence
  Synthetically generated peptide
CCEKCGNPACTGC

SEQ ID NO: 3734 - protein, 13 aa, Artificial Sequence
  Synthetically generated peptide
CCEMCGNPACTGC

SEQ ID NO: 3735 - protein, 13 aa, Artificial Sequence
  Synthetically generated peptide
CCEFCGNPACTGC

SEQ ID NO: 3736 - protein, 13 aa, Artificial Sequence
  Synthetically generated peptide
CCEPCGNPACTGC

SEQ ID NO: 3737 - protein, 13 aa, Artificial Sequence
  Synthetically generated peptide
CCESCGNPACTGC

SEQ ID NO: 3738 - protein, 13 aa, Artificial Sequence
  Synthetically generated peptide
CCETCGNPACTGC

SEQ ID NO: 3739 - protein, 13 aa, Artificial Sequence
  Synthetically generated peptide
CCEWCGNPACTGC

SEQ ID NO: 3740 - protein, 13 aa, Artificial Sequence
  Synthetically generated peptide
CCEYCGNPACTGC

SEQ ID NO: 3741 - protein, 13 aa, Artificial Sequence
  Synthetically generated peptide
CCEVCGNPACTGC

SEQ ID NO: 3742 - protein, 14 aa, Artificial Sequence
  Synthetically generated peptide
CCELCGNPACTGCY

SEQ ID NO: 3743 - protein, 14 aa, Artificial Sequence
  Synthetically generated peptide
CCEACGNPACTGCY

SEQ ID NO: 3744 - protein, 14 aa, Artificial Sequence
  Synthetically generated peptide
CCERCGNPACTGCY

SEQ ID NO: 3745 - protein, 14 aa, Artificial Sequence
  Synthetically generated peptide
CCENCGNPACTGCY

SEQ ID NO: 3746 - protein, 14 aa, Artificial Sequence
  Synthetically generated peptide
CCEDCGNPACTGCY

SEQ ID NO: 3747 - protein, 14 aa, Artificial Sequence
  Synthetically generated peptide
CCECCGNPACTGCY

SEQ ID NO: 3748 - protein, 14 aa, Artificial Sequence
  Synthetically generated peptide
CCEQCGNPACTGCY

SEQ ID NO: 3749 - protein, 14 aa, Artificial Sequence
  Synthetically generated peptide
CCEECGNPACTGCY

SEQ ID NO: 3750 - protein, 14 aa, Artificial Sequence
  Synthetically generated peptide
CCEGCGNPACTGCY

SEQ ID NO: 3751 - protein, 14 aa, Artificial Sequence
  Synthetically generated peptide
CCEHCGNPACTGCY

SEQ ID NO: 3752 - protein, 14 aa, Artificial Sequence
  Synthetically generated peptide
CCEICGNPACTGCY

SEQ ID NO: 3753 - protein, 14 aa, Artificial Sequence
  Synthetically generated peptide
CCEKCGNPACTGCY

SEQ ID NO: 3754 - protein, 14 aa, Artificial Sequence
  Synthetically generated peptide
CCEMCGNPACTGCY

SEQ ID NO: 3755 - protein, 14 aa, Artificial Sequence
  Synthetically generated peptide
CCEFCGNPACTGCY

SEQ ID NO: 3756 - protein, 14 aa, Artificial Sequence
  Synthetically generated peptide
CCEPCGNPACTGCY

SEQ ID NO: 3757 - protein, 14 aa, Artificial Sequence
  Synthetically generated peptide
CCESCGNPACTGCY

SEQ ID NO: 3758 - protein, 14 aa, Artificial Sequence
  Synthetically generated peptide
CCETCGNPACTGCY

SEQ ID NO: 3759 - protein, 14 aa, Artificial Sequence
  Synthetically generated peptide
CCEWCGNPACTGCY

SEQ ID NO: 3760 - protein, 14 aa, Artificial Sequence
  Synthetically generated peptide
CCEYCGNPACTGCY

SEQ ID NO: 3761 - protein, 14 aa, Artificial Sequence
  Synthetically generated peptide
CCEVCGNPACTGCY

SEQ ID NO: 3762 - protein, 13 aa, Artificial Sequence
  Synthetically generated peptide
ACELCGNPACTGC

SEQ ID NO: 3763 - protein, 13 aa, Artificial Sequence
  Synthetically generated peptide
ACEACGNPACTGC

SEQ ID NO: 3764 - protein, 13 aa, Artificial Sequence
  Synthetically generated peptide
ACERCGNPACTGC

SEQ ID NO: 3765 - protein, 13 aa, Artificial Sequence
  Synthetically generated peptide
ACENCGNPACTGC

SEQ ID NO: 3766 - protein, 13 aa, Artificial Sequence
  Synthetically generated peptide
ACEDCGNPACTGC

SEQ ID NO: 3767 - protein, 13 aa, Artificial Sequence
  Synthetically generated peptide
ACECCGNPACTGC

SEQ ID NO: 3768 - protein, 13 aa, Artificial Sequence
  Synthetically generated peptide
ACEQCGNPACTGC

SEQ ID NO: 3769 - protein, 13 aa, Artificial Sequence
  Synthetically generated peptide
ACEECGNPACTGC

SEQ ID NO: 3770 - protein, 13 aa, Artificial Sequence
  Synthetically generated peptide
ACEGCGNPACTGC

SEQ ID NO: 3771 - protein, 13 aa, Artificial Sequence
  Synthetically generated peptide
ACEHCGNPACTGC

SEQ ID NO: 3772 - protein, 13 aa, Artificial Sequence
  Synthetically generated peptide
ACEICGNPACTGC

SEQ ID NO: 3773 - protein, 13 aa, Artificial Sequence
  Synthetically generated peptide
ACEKCGNPACTGC

SEQ ID NO: 3774 - protein, 13 aa, Artificial Sequence
  Synthetically generated peptide
ACEMCGNPACTGC

SEQ ID NO: 3775 - protein, 13 aa, Artificial Sequence
  Synthetically generated peptide
ACEFCGNPACTGC

SEQ ID NO: 3776 - protein, 13 aa, Artificial Sequence
  Synthetically generated peptide
ACEPCGNPACTGC

SEQ ID NO: 3777 - protein, 13 aa, Artificial Sequence
  Synthetically generated peptide
ACESCGNPACTGC

SEQ ID NO: 3778 - protein, 13 aa, Artificial Sequence
  Synthetically generated peptide
ACETCGNPACTGC

SEQ ID NO: 3779 - protein, 13 aa, Artificial Sequence
  Synthetically generated peptide
ACEWCGNPACTGC

SEQ ID NO: 3780 - protein, 13 aa, Artificial Sequence
  Synthetically generated peptide
ACEYCGNPACTGC

SEQ ID NO: 3781 - protein, 13 aa, Artificial Sequence
  Synthetically generated peptide
ACEVCGNPACTGC

SEQ ID NO: 3782 - protein, 14 aa, Artificial Sequence
  Synthetically generated peptide
ACELCGNPACTGCY

SEQ ID NO: 3783 - protein, 14 aa, Artificial Sequence
  Synthetically generated peptide
ACEACGNPACTGCY

SEQ ID NO: 3784 - protein, 14 aa, Artificial Sequence
  Synthetically generated peptide
ACERCGNPACTGCY

SEQ ID NO: 3785 - protein, 14 aa, Artificial Sequence
  Synthetically generated peptide
ACENCGNPACTGCY

SEQ ID NO: 3786 - protein, 14 aa, Artificial Sequence
  Synthetically generated peptide
ACEDCGNPACTGCY

SEQ ID NO: 3787 - protein, 14 aa, Artificial Sequence
  Synthetically generated peptide
ACECCGNPACTGCY

SEQ ID NO: 3788 - protein, 14 aa, Artificial Sequence
  Synthetically generated peptide
ACEQCGNPACTGCY

SEQ ID NO: 3789 - protein, 14 aa, Artificial Sequence
  Synthetically generated peptide
ACEECGNPACTGCY

SEQ ID NO: 3790 - protein, 14 aa, Artificial Sequence
  Synthetically generated peptide
ACEGCGNPACTGCY

SEQ ID NO: 3791 - protein, 14 aa, Artificial Sequence
  Synthetically generated peptide
ACEHCGNPACTGCY

SEQ ID NO: 3792 - protein, 14 aa, Artificial Sequence
  Synthetically generated peptide
ACEICGNPACTGCY

SEQ ID NO: 3793 - protein, 14 aa, Artificial Sequence
  Synthetically generated peptide
ACEKCGNPACTGCY

SEQ ID NO: 3794 - protein, 14 aa, Artificial Sequence
  Synthetically generated peptide
ACEMCGNPACTGCY

SEQ ID NO: 3795 - protein, 14 aa, Artificial Sequence
  Synthetically generated peptide
ACEFCGNPACTGCY

SEQ ID NO: 3796 - protein, 14 aa, Artificial Sequence
  Synthetically generated peptide
ACEPCGNPACTGCY

SEQ ID NO: 3797 - protein, 14 aa, Artificial Sequence
  Synthetically generated peptide
ACESCGNPACTGCY

SEQ ID NO: 3798 - protein, 14 aa, Artificial Sequence
  Synthetically generated peptide
ACETCGNPACTGCY

SEQ ID NO: 3799 - protein, 14 aa, Artificial Sequence
  Synthetically generated peptide
ACEWCGNPACTGCY

SEQ ID NO: 3800 - protein, 14 aa, Artificial Sequence
  Synthetically generated peptide
ACEYCGNPACTGCY

SEQ ID NO: 3801 - protein, 14 aa, Artificial Sequence
  Synthetically generated peptide
ACEVCGNPACTGCY

SEQ ID NO: 3802 - protein, 13 aa, Artificial Sequence
  Synthetically generated peptide
GCELCANPACTGC

SEQ ID NO: 3803 - protein, 13 aa, Artificial Sequence
  Synthetically generated peptide
GCEACANPACTGC

SEQ ID NO: 3804 - protein, 13 aa, Artificial Sequence
  Synthetically generated peptide
GCERCANPACTGC

SEQ ID NO: 3805 - protein, 13 aa, Artificial Sequence
  Synthetically generated peptide
GCENCANPACTGC

SEQ ID NO: 3806 - protein, 13 aa, Artificial Sequence
  Synthetically generated peptide
GCEDCANPACTGC

SEQ ID NO: 3807 - protein, 13 aa, Artificial Sequence
  Synthetically generated peptide
GCECCANPACTGC

SEQ ID NO: 3808 - protein, 13 aa, Artificial Sequence
  Synthetically generated peptide
GCEQCANPACTGC

SEQ ID NO: 3809 - protein, 13 aa, Artificial Sequence
  Synthetically generated peptide
GCEECANPACTGC

SEQ ID NO: 3810 - protein, 13 aa, Artificial Sequence
  Synthetically generated peptide
GCEGCANPACTGC

SEQ ID NO: 3811 - protein, 13 aa, Artificial Sequence
  Synthetically generated peptide
GCEHCANPACTGC

SEQ ID NO: 3812 - protein, 13 aa, Artificial Sequence
  Synthetically generated peptide
GCEICANPACTGC

SEQ ID NO: 3813 - protein, 13 aa, Artificial Sequence
  Synthetically generated peptide
GCEKCANPACTGC

SEQ ID NO: 3814 - protein, 13 aa, Artificial Sequence
  Synthetically generated peptide
GCEMCANPACTGC

SEQ ID NO: 3815 - protein, 13 aa, Artificial Sequence
  Synthetically generated peptide
GCEFCANPACTGC

SEQ ID NO: 3816 - protein, 13 aa, Artificial Sequence
  Synthetically generated peptide
GCEPCANPACTGC

SEQ ID NO: 3817 - protein, 13 aa, Artificial Sequence
  Synthetically generated peptide
GCESCANPACTGC

SEQ ID NO: 3818 - protein, 13 aa, Artificial Sequence
  Synthetically generated peptide
GCETCANPACTGC

SEQ ID NO: 3819 - protein, 13 aa, Artificial Sequence
  Synthetically generated peptide
GCEWCANPACTGC

SEQ ID NO: 3820 - protein, 13 aa, Artificial Sequence
  Synthetically generated peptide
GCEYCANPACTGC

SEQ ID NO: 3821 - protein, 13 aa, Artificial Sequence
  Synthetically generated peptide
GCEVCANPACTGC

SEQ ID NO: 3822 - protein, 14 aa, Artificial Sequence
  Synthetically generated peptide
GCELCANPACTGCY

SEQ ID NO: 3823 - protein, 14 aa, Artificial Sequence
  Synthetically generated peptide
GCEACANPACTGCY

SEQ ID NO: 3824 - protein, 14 aa, Artificial Sequence
  Synthetically generated peptide
GCERCANPACTGCY

SEQ ID NO: 3825 - protein, 14 aa, Artificial Sequence
  Synthetically generated peptide
GCENCANPACTGCY

SEQ ID NO: 3826 - protein, 14 aa, Artificial Sequence
  Synthetically generated peptide
GCEDCANPACTGCY

SEQ ID NO: 3827 - protein, 14 aa, Artificial Sequence
  Synthetically generated peptide
GCECCANPACTGCY

SEQ ID NO: 3828 - protein, 14 aa, Artificial Sequence
  Synthetically generated peptide
GCEQCANPACTGCY

SEQ ID NO: 3829 - protein, 14 aa, Artificial Sequence
  Synthetically generated peptide
GCEECANPACTGCY

SEQ ID NO: 3830 - protein, 14 aa, Artificial Sequence
  Synthetically generated peptide
GCEGCANPACTGCY

SEQ ID NO: 3831 - protein, 14 aa, Artificial Sequence
  Synthetically generated peptide
GCEHCANPACTGCY

SEQ ID NO: 3832 - protein, 14 aa, Artificial Sequence
  Synthetically generated peptide
GCEICANPACTGCY

SEQ ID NO: 3833 - protein, 14 aa, Artificial Sequence
  Synthetically generated peptide
GCEKCANPACTGCY

SEQ ID NO: 3834 - protein, 14 aa, Artificial Sequence
  Synthetically generated peptide
GCEMCANPACTGCY

SEQ ID NO: 3835 - protein, 14 aa, Artificial Sequence
  Synthetically generated peptide
GCEFCANPACTGCY

SEQ ID NO: 3836 - protein, 14 aa, Artificial Sequence
  Synthetically generated peptide
GCEPCANPACTGCY

SEQ ID NO: 3837 - protein, 14 aa, Artificial Sequence
  Synthetically generated peptide
GCESCANPACTGCY

SEQ ID NO: 3838 - protein, 14 aa, Artificial Sequence
  Synthetically generated peptide
GCETCANPACTGCY

SEQ ID NO: 3839 - protein, 14 aa, Artificial Sequence
  Synthetically generated peptide
GCEWCANPACTGCY

SEQ ID NO: 3840 - protein, 14 aa, Artificial Sequence
  Synthetically generated peptide
GCEYCANPACTGCY

SEQ ID NO: 3841 - protein, 14 aa, Artificial Sequence
  Synthetically generated peptide
GCEVCANPACTGCY

SEQ ID NO: 3842 - protein, 13 aa, Artificial Sequence
  Synthetically generated peptide
CCEAACNPACTGA

SEQ ID NO: 3843 - protein, 13 aa, Artificial Sequence
  Synthetically generated peptide
CCERACNPACTGA

SEQ ID NO: 3844 - protein, 13 aa, Artificial Sequence
  Synthetically generated peptide
CCENACNPACTGA

SEQ ID NO: 3845 - protein, 13 aa, Artificial Sequence
  Synthetically generated peptide
CCEDACNPACTGA

SEQ ID NO: 3846 - protein, 13 aa, Artificial Sequence
  Synthetically generated peptide
CCECACNPACTGA

SEQ ID NO: 3847 - protein, 13 aa, Artificial Sequence
  Synthetically generated peptide
CCEQACNPACTGA

SEQ ID NO: 3848 - protein, 13 aa, Artificial Sequence
  Synthetically generated peptide
CCEEACNPACTGA

SEQ ID NO: 3849 - protein, 13 aa, Artificial Sequence
  Synthetically generated peptide
CCEGACNPACTGA

SEQ ID NO: 3850 - protein, 13 aa, Artificial Sequence
  Synthetically generated peptide
CCEHACNPACTGA

SEQ ID NO: 3851 - protein, 13 aa, Artificial Sequence
  Synthetically generated peptide
CCEIACNPACTGA

SEQ ID NO: 3852 - protein, 13 aa, Artificial Sequence
  Synthetically generated peptide
CCEKACNPACTGA

SEQ ID NO: 3853 - protein, 13 aa, Artificial Sequence
  Synthetically generated peptide
CCEMACNPACTGA

SEQ ID NO: 3854 - protein, 13 aa, Artificial Sequence
  Synthetically generated peptide
CCEFACNPACTGA

SEQ ID NO: 3855 - protein, 13 aa, Artificial Sequence
  Synthetically generated peptide
CCEPACNPACTGA

SEQ ID NO: 3856 - protein, 13 aa, Artificial Sequence
  Synthetically generated peptide
CCESACNPACTGA

SEQ ID NO: 3857 - protein, 13 aa, Artificial Sequence
  Synthetically generated peptide
CCETACNPACTGA

SEQ ID NO: 3858 - protein, 13 aa, Artificial Sequence
  Synthetically generated peptide
CCEWACNPACTGA

SEQ ID NO: 3859 - protein, 13 aa, Artificial Sequence
  Synthetically generated peptide
CCEYACNPACTGA

SEQ ID NO: 3860 - protein, 13 aa, Artificial Sequence
  Synthetically generated peptide
CCEVACNPACTGA

SEQ ID NO: 3861 - protein, 14 aa, Artificial Sequence
  Synthetically generated peptide
CCELACNPACTGAY

SEQ ID NO: 3862 - protein, 14 aa, Artificial Sequence
  Synthetically generated peptide
CCEAACNPACTGAY

SEQ ID NO: 3863 - protein, 14 aa, Artificial Sequence
  Synthetically generated peptide
CCERACNPACTGAY

SEQ ID NO: 3864 - protein, 14 aa, Artificial Sequence
  Synthetically generated peptide
CCENACNPACTGAY

SEQ ID NO: 3865 - protein, 14 aa, Artificial Sequence
  Synthetically generated peptide
CCEDACNPACTGAY

SEQ ID NO: 3866 - protein, 14 aa, Artificial Sequence
  Synthetically generated peptide
CCECACNPACTGAY

SEQ ID NO: 3867 - protein, 14 aa, Artificial Sequence
  Synthetically generated peptide
CCEQACNPACTGAY

SEQ ID NO: 3868 - protein, 14 aa, Artificial Sequence
  Synthetically generated peptide
CCEEACNPACTGAY

SEQ ID NO: 3869 - protein, 14 aa, Artificial Sequence
  Synthetically generated peptide
CCEGACNPACTGAY

SEQ ID NO: 3870 - protein, 14 aa, Artificial Sequence
  Synthetically generated peptide
CCEHACNPACTGAY

SEQ ID NO: 3871 - protein, 14 aa, Artificial Sequence
  Synthetically generated peptide
CCEIACNPACTGAY

SEQ ID NO: 3872 - protein, 14 aa, Artificial Sequence
  Synthetically generated peptide
CCEKACNPACTGAY

SEQ ID NO: 3873 - protein, 14 aa, Artificial Sequence
  Synthetically generated peptide
CCEMACNPACTGAY

SEQ ID NO: 3874 - protein, 14 aa, Artificial Sequence
  Synthetically generated peptide
CCEFACNPACTGAY

SEQ ID NO: 3875 - protein, 14 aa, Artificial Sequence
  Synthetically generated peptide
CCEPACNPACTGAY

SEQ ID NO: 3876 - protein, 14 aa, Artificial Sequence
  Synthetically generated peptide
CCESACNPACTGAY

SEQ ID NO: 3877 - protein, 14 aa, Artificial Sequence
  Synthetically generated peptide
CCETACNPACTGAY

SEQ ID NO: 3878 - protein, 14 aa, Artificial Sequence
  Synthetically generated peptide
CCEWACNPACTGAY

SEQ ID NO: 3879 - protein, 14 aa, Artificial Sequence
  Synthetically generated peptide
CCEYACNPACTGAY

SEQ ID NO: 3880 - protein, 14 aa, Artificial Sequence
  Synthetically generated peptide
CCEVACNPACTGAY

SEQ ID NO: 3881 - protein, 13 aa, Artificial Sequence
  Synthetically generated peptide
CCELACNPACTGC

SEQ ID NO: 3882 - protein, 13 aa, Artificial Sequence
  Synthetically generated peptide
CCEAACNPACTGC

SEQ ID NO: 3883 - protein, 13 aa, Artificial Sequence
  Synthetically generated peptide
CCERACNPACTGC

SEQ ID NO: 3884 - protein, 13 aa, Artificial Sequence
  Synthetically generated peptide
CCENACNPACTGC

SEQ ID NO: 3885 - protein, 13 aa, Artificial Sequence
  Synthetically generated peptide
CCEDACNPACTGC

SEQ ID NO: 3886 - protein, 13 aa, Artificial Sequence
  Synthetically generated peptide
CCECACNPACTGC

SEQ ID NO: 3887 - protein, 13 aa, Artificial Sequence
  Synthetically generated peptide
CCEQACNPACTGC

SEQ ID NO: 3888 - protein, 13 aa, Artificial Sequence
  Synthetically generated peptide
CCEEACNPACTGC

SEQ ID NO: 3889 - protein, 13 aa, Artificial Sequence
  Synthetically generated peptide
CCEGACNPACTGC

SEQ ID NO: 3890 - protein, 13 aa, Artificial Sequence
  Synthetically generated peptide
CCEHACNPACTGC

SEQ ID NO: 3891 - protein, 13 aa, Artificial Sequence
  Synthetically generated peptide
CCEIACNPACTGC

SEQ ID NO: 3892 - protein, 13 aa, Artificial Sequence
  Synthetically generated peptide
CCEKACNPACTGC

SEQ ID NO: 3893 - protein, 13 aa, Artificial Sequence
  Synthetically generated peptide
CCEMACNPACTGC

SEQ ID NO: 3894 - protein, 13 aa, Artificial Sequence
  Synthetically generated peptide
CCEFACNPACTGC

SEQ ID NO: 3895 - protein, 13 aa, Artificial Sequence
  Synthetically generated peptide
CCEPACNPACTGC

SEQ ID NO: 3896 - protein, 13 aa, Artificial Sequence
  Synthetically generated peptide
CCESACNPACTGC

SEQ ID NO: 3897 - protein, 13 aa, Artificial Sequence
  Synthetically generated peptide
CCETACNPACTGC

SEQ ID NO: 3898 - protein, 13 aa, Artificial Sequence
  Synthetically generated peptide
CCEWACNPACTGC

SEQ ID NO: 3899 - protein, 13 aa, Artificial Sequence
  Synthetically generated peptide
CCEYACNPACTGC

SEQ ID NO: 3900 - protein, 13 aa, Artificial Sequence
  Synthetically generated peptide
CCEVACNPACTGC

SEQ ID NO: 3901 - protein, 14 aa, Artificial Sequence
  Synthetically generated peptide
CCELACNPACTGCY

SEQ ID NO: 3902 - protein, 14 aa, Artificial Sequence
  Synthetically generated peptide
CCEAACNPACTGCY

SEQ ID NO: 3903 - protein, 14 aa, Artificial Sequence
  Synthetically generated peptide
CCERACNPACTGCY

SEQ ID NO: 3904 - protein, 14 aa, Artificial Sequence
  Synthetically generated peptide
CCENACNPACTGCY

SEQ ID NO: 3905 - protein, 14 aa, Artificial Sequence
  Synthetically generated peptide
CCEDACNPACTGCY

SEQ ID NO: 3906 - protein, 14 aa, Artificial Sequence
  Synthetically generated peptide
CCECACNPACTGCY

SEQ ID NO: 3907 - protein, 14 aa, Artificial Sequence
  Synthetically generated peptide
CCEQACNPACTGCY

SEQ ID NO: 3908 - protein, 14 aa, Artificial Sequence
  Synthetically generated peptide
CCEEACNPACTGCY

SEQ ID NO: 3909 - protein, 14 aa, Artificial Sequence
  Synthetically generated peptide
CCEGACNPACTGCY

SEQ ID NO: 3910 - protein, 14 aa, Artificial Sequence
  Synthetically generated peptide
CCEHACNPACTGCY

SEQ ID NO: 3911 - protein, 14 aa, Artificial Sequence
  Synthetically generated peptide
CCEIACNPACTGCY

SEQ ID NO: 3912 - protein, 14 aa, Artificial Sequence
  Synthetically generated peptide
CCEKACNPACTGCY

SEQ ID NO: 3913 - protein, 14 aa, Artificial Sequence
  Synthetically generated peptide
CCEMACNPACTGCY

SEQ ID NO: 3914 - protein, 14 aa, Artificial Sequence
  Synthetically generated peptide
CCEFACNPACTGCY

SEQ ID NO: 3915 - protein, 14 aa, Artificial Sequence
  Synthetically generated peptide
CCEPACNPACTGCY

SEQ ID NO: 3916 - protein, 14 aa, Artificial Sequence
  Synthetically generated peptide
CCESACNPACTGCY

SEQ ID NO: 3917 - protein, 14 aa, Artificial Sequence
  Synthetically generated peptide
CCETACNPACTGCY

SEQ ID NO: 3918 - protein, 14 aa, Artificial Sequence
  Synthetically generated peptide
CCEWACNPACTGCY

SEQ ID NO: 3919 - protein, 14 aa, Artificial Sequence
  Synthetically generated peptide
CCEYACNPACTGCY

SEQ ID NO: 3920 - protein, 13 aa, Artificial Sequence
  Synthetically generated peptide
CCELCCNPACTGA

SEQ ID NO: 3921 - protein, 13 aa, Artificial Sequence
  Synthetically generated peptide
CCEACCNPACTGA

SEQ ID NO: 3922 - protein, 13 aa, Artificial Sequence
  Synthetically generated peptide
CCERCCNPACTGA

SEQ ID NO: 3923 - protein, 13 aa, Artificial Sequence
  Synthetically generated peptide
CCENCCNPACTGA

SEQ ID NO: 3924 - protein, 13 aa, Artificial Sequence
  Synthetically generated peptide
CCEDCCNPACTGA

SEQ ID NO: 3925 - protein, 13 aa, Artificial Sequence
  Synthetically generated peptide
CCECCCNPACTGA

SEQ ID NO: 3926 - protein, 13 aa, Artificial Sequence
  Synthetically generated peptide
CCEQCCNPACTGA

SEQ ID NO: 3927 - protein, 13 aa, Artificial Sequence
  Synthetically generated peptide
CCEECCNPACTGA

SEQ ID NO: 3928 - protein, 13 aa, Artificial Sequence
  Synthetically generated peptide
CCEGCCNPACTGA

SEQ ID NO: 3929 - protein, 13 aa, Artificial Sequence
  Synthetically generated peptide
CCEHCCNPACTGA

SEQ ID NO: 3930 - protein, 13 aa, Artificial Sequence
  Synthetically generated peptide
CCEICCNPACTGA

SEQ ID NO: 3931 - protein, 13 aa, Artificial Sequence
  Synthetically generated peptide
CCEKCCNPACTGA

SEQ ID NO: 3932 - protein, 13 aa, Artificial Sequence
  Synthetically generated peptide
CCEMCCNPACTGA

SEQ ID NO: 3933 - protein, 13 aa, Artificial Sequence
  Synthetically generated peptide
CCEFCCNPACTGA

SEQ ID NO: 3934 - protein, 13 aa, Artificial Sequence
  Synthetically generated peptide
CCEPCCNPACTGA

SEQ ID NO: 3935 - protein, 13 aa, Artificial Sequence
  Synthetically generated peptide
CCESCCNPACTGA

SEQ ID NO: 3936 - protein, 13 aa, Artificial Sequence
  Synthetically generated peptide
CCETCCNPACTGA

SEQ ID NO: 3937 - protein, 13 aa, Artificial Sequence
  Synthetically generated peptide
CCEWCCNPACTGA

SEQ ID NO: 3938 - protein, 13 aa, Artificial Sequence
  Synthetically generated peptide
CCEYCCNPACTGA

SEQ ID NO: 3939 - protein, 13 aa, Artificial Sequence
  Synthetically generated peptide
CCEVCCNPACTGA

SEQ ID NO: 3940 - protein, 14 aa, Artificial Sequence
  Synthetically generated peptide
CCELCCNPACTGAY

SEQ ID NO: 3941 - protein, 14 aa, Artificial Sequence
  Synthetically generated peptide
CCEACCNPACTGAY

SEQ ID NO: 3942 - protein, 14 aa, Artificial Sequence
  Synthetically generated peptide
CCERCCNPACTGAY

SEQ ID NO: 3943 - protein, 14 aa, Artificial Sequence
  Synthetically generated peptide
CCENCCNPACTGAY

SEQ ID NO: 3944 - protein, 14 aa, Artificial Sequence
  Synthetically generated peptide
CCEDCCNPACTGAY

SEQ ID NO: 3945 - protein, 14 aa, Artificial Sequence
  Synthetically generated peptide
CCECCCNPACTGAY

SEQ ID NO: 3946 - protein, 14 aa, Artificial Sequence
  Synthetically generated peptide
CCEQCCNPACTGAY

SEQ ID NO: 3947 - protein, 14 aa, Artificial Sequence
  Synthetically generated peptide
CCEECCNPACTGAY

SEQ ID NO: 3948 - protein, 14 aa, Artificial Sequence
  Synthetically generated peptide
CCEGCCNPACTGAY

SEQ ID NO: 3949 - protein, 14 aa, Artificial Sequence
  Synthetically generated peptide
CCEHCCNPACTGAY

SEQ ID NO: 3950 - protein, 14 aa, Artificial Sequence
  Synthetically generated peptide
CCEICCNPACTGAY

SEQ ID NO: 3951 - protein, 14 aa, Artificial Sequence
  Synthetically generated peptide
CCEKCCNPACTGAY

SEQ ID NO: 3952 - protein, 14 aa, Artificial Sequence
  Synthetically generated peptide
CCEMCCNPACTGAY

SEQ ID NO: 3953 - protein, 14 aa, Artificial Sequence
  Synthetically generated peptide
CCEFCCNPACTGAY

SEQ ID NO: 3954 - protein, 14 aa, Artificial Sequence
  Synthetically generated peptide
CCEPCCNPACTGAY

SEQ ID NO: 3955 - protein, 14 aa, Artificial Sequence
  Synthetically generated peptide
CCESCCNPACTGAY

SEQ ID NO: 3956 - protein, 14 aa, Artificial Sequence
  Synthetically generated peptide
CCETCCNPACTGAY

SEQ ID NO: 3957 - protein, 14 aa, Artificial Sequence
  Synthetically generated peptide
CCEWCCNPACTGAY

SEQ ID NO: 3958 - protein, 14 aa, Artificial Sequence
  Synthetically generated peptide
CCEYCCNPACTGAY

SEQ ID NO: 3959 - protein, 14 aa, Artificial Sequence
  Synthetically generated peptide
CCEVCCNPACTGAY

SEQ ID NO: 3960 - protein, 13 aa, Artificial Sequence
  Synthetically generated peptide
CCELGCNPACTGG

SEQ ID NO: 3961 - protein, 13 aa, Artificial Sequence
  Synthetically generated peptide
CCEAGCNPACTGG

SEQ ID NO: 3962 - protein, 13 aa, Artificial Sequence
  Synthetically generated peptide
CCERGCNPACTGG

SEQ ID NO: 3963 - protein, 13 aa, Artificial Sequence
  Synthetically generated peptide
CCENGCNPACTGG

SEQ ID NO: 3964 - protein, 13 aa, Artificial Sequence
  Synthetically generated peptide
CCEDGCNPACTGG

SEQ ID NO: 3965 - protein, 13 aa, Artificial Sequence
  Synthetically generated peptide
CCECGCNPACTGG

SEQ ID NO: 3966 - protein, 13 aa, Artificial Sequence
  Synthetically generated peptide
CCEQGCNPACTGG

SEQ ID NO: 3967 - protein, 13 aa, Artificial Sequence
  Synthetically generated peptide
CCEEGCNPACTGG

SEQ ID NO: 3968 - protein, 13 aa, Artificial Sequence
  Synthetically generated peptide
CCEGGCNPACTGG

SEQ ID NO: 3969 - protein, 13 aa, Artificial Sequence
  Synthetically generated peptide
CCEHGCNPACTGG

SEQ ID NO: 3970 - protein, 13 aa, Artificial Sequence
  Synthetically generated peptide
CCEIGCNPACTGG

SEQ ID NO: 3971 - protein, 13 aa, Artificial Sequence
  Synthetically generated peptide
CCEKGCNPACTGG

SEQ ID NO: 3972 - protein, 13 aa, Artificial Sequence
  Synthetically generated peptide
CCEMGCNPACTGG

SEQ ID NO: 3973 - protein, 13 aa, Artificial Sequence
  Synthetically generated peptide
CCEFGCNPACTGG

SEQ ID NO: 3974 - protein, 13 aa, Artificial Sequence
  Synthetically generated peptide
CCEPGCNPACTGG

SEQ ID NO: 3975 - protein, 13 aa, Artificial Sequence
  Synthetically generated peptide
CCESGCNPACTGG

SEQ ID NO: 3976 - protein, 13 aa, Artificial Sequence
  Synthetically generated peptide
CCETGCNPACTGG

SEQ ID NO: 3977 - protein, 13 aa, Artificial Sequence
  Synthetically generated peptide
CCEWGCNPACTGG

SEQ ID NO: 3978 - protein, 13 aa, Artificial Sequence
  Synthetically generated peptide
CCEYGCNPACTGG

SEQ ID NO: 3979 - protein, 13 aa, Artificial Sequence
  Synthetically generated peptide
CCEVGCNPACTGG

SEQ ID NO: 3980 - protein, 14 aa, Artificial Sequence
  Synthetically generated peptide
CCELGCNPACTGGY

SEQ ID NO: 3981 - protein, 14 aa, Artificial Sequence
  Synthetically generated peptide
CCEAGCNPACTGGY

SEQ ID NO: 3982 - protein, 14 aa, Artificial Sequence
  Synthetically generated peptide
CCERGCNPACTGGY

SEQ ID NO: 3983 - protein, 14 aa, Artificial Sequence
  Synthetically generated peptide
CCENGCNPACTGGY

SEQ ID NO: 3984 - protein, 14 aa, Artificial Sequence
  Synthetically generated peptide
CCEDGCNPACTGGY

SEQ ID NO: 3985 - protein, 14 aa, Artificial Sequence
  Synthetically generated peptide
CCECGCNPACTGGY

SEQ ID NO: 3986 - protein, 14 aa, Artificial Sequence
  Synthetically generated peptide
CCEQGCNPACTGGY

SEQ ID NO: 3987 - protein, 14 aa, Artificial Sequence
  Synthetically generated peptide
CCEEGCNPACTGGY

SEQ ID NO: 3988 - protein, 14 aa, Artificial Sequence
  Synthetically generated peptide
CCEGGCNPACTGGY

SEQ ID NO: 3989 - protein, 14 aa, Artificial Sequence
  Synthetically generated peptide
CCEHGCNPACTGGY

SEQ ID NO: 3990 - protein, 14 aa, Artificial Sequence
  Synthetically generated peptide
CCEIGCNPACTGGY

SEQ ID NO: 3991 - protein, 14 aa, Artificial Sequence
  Synthetically generated peptide
CCEKGCNPACTGGY

SEQ ID NO: 3992 - protein, 14 aa, Artificial Sequence
  Synthetically generated peptide
CCEMGCNPACTGGY

SEQ ID NO: 3993 - protein, 14 aa, Artificial Sequence
  Synthetically generated peptide
CCEFGCNPACTGGY

SEQ ID NO: 3994 - protein, 14 aa, Artificial Sequence
  Synthetically generated peptide
CCEPGCNPACTGGY

SEQ ID NO: 3995 - protein, 14 aa, Artificial Sequence
  Synthetically generated peptide
CCESGCNPACTGGY

SEQ ID NO: 3996 - protein, 14 aa, Artificial Sequence
  Synthetically generated peptide
CCETGCNPACTGGY

SEQ ID NO: 3997 - protein, 14 aa, Artificial Sequence
  Synthetically generated peptide
CCEWGCNPACTGGY

SEQ ID NO: 3998 - protein, 14 aa, Artificial Sequence
  Synthetically generated peptide
CCEYGCNPACTGGY

SEQ ID NO: 3999 - protein, 14 aa, Artificial Sequence
  Synthetically generated peptide
CCEVGCNPACTGGY

SEQ ID NO: 4000 - protein, 14 aa, Artificial Sequence
  Synthetically generated peptide
CCEVACNPACTGCY

SEQ ID NO: 4001 - protein, 13 aa, Artificial Sequence
  Synthetically generated peptide
CCELGCNPACTGC

SEQ ID NO: 4002 - protein, 13 aa, Artificial Sequence
  Synthetically generated peptide
CCEAGCNPACTGC

SEQ ID NO: 4003 - protein, 13 aa, Artificial Sequence
  Synthetically generated peptide
CCERGCNPACTGC

SEQ ID NO: 4004 - protein, 13 aa, Artificial Sequence
  Synthetically generated peptide
CCENGCNPACTGC

SEQ ID NO: 4005 - protein, 13 aa, Artificial Sequence
  Synthetically generated peptide
CCEDGCNPACTGC

SEQ ID NO: 4006 - protein, 13 aa, Artificial Sequence
  Synthetically generated peptide
CCECGCNPACTGC

SEQ ID NO: 4007 - protein, 13 aa, Artificial Sequence
  Synthetically generated peptide
CCEQGCNPACTGC

SEQ ID NO: 4008 - protein, 13 aa, Artificial Sequence
  Synthetically generated peptide
CCEEGCNPACTGC

SEQ ID NO: 4009 - protein, 13 aa, Artificial Sequence
  Synthetically generated peptide
CCEGGCNPACTGC

SEQ ID NO: 4010 - protein, 13 aa, Artificial Sequence
  Synthetically generated peptide
CCEHGCNPACTGC

SEQ ID NO: 4011 - protein, 13 aa, Artificial Sequence
  Synthetically generated peptide
CCEIGCNPACTGC

SEQ ID NO: 4012 - protein, 13 aa, Artificial Sequence
  Synthetically generated peptide
CCEKGCNPACTGC

SEQ ID NO: 4013 - protein, 13 aa, Artificial Sequence
  Synthetically generated peptide
CCEMGCNPACTGC

SEQ ID NO: 4014 - protein, 13 aa, Artificial Sequence
  Synthetically generated peptide
CCEFGCNPACTGC

SEQ ID NO: 4015 - protein, 13 aa, Artificial Sequence
  Synthetically generated peptide
CCEPGCNPACTGC

SEQ ID NO: 4016 - protein, 13 aa, Artificial Sequence
  Synthetically generated peptide
CCESGCNPACTGC

SEQ ID NO: 4017 - protein, 13 aa, Artificial Sequence
  Synthetically generated peptide
CCETGCNPACTGC

SEQ ID NO: 4018 - protein, 13 aa, Artificial Sequence
  Synthetically generated peptide
CCEWGCNPACTGC

SEQ ID NO: 4019 - protein, 13 aa, Artificial Sequence
  Synthetically generated peptide
CCEYGCNPACTGC

SEQ ID NO: 4020 - protein, 13 aa, Artificial Sequence
  Synthetically generated peptide
CCEVGCNPACTGC

SEQ ID NO: 4021 - protein, 14 aa, Artificial Sequence
  Synthetically generated peptide
CCELGCNPACTGCY

SEQ ID NO: 4022 - protein, 14 aa, Artificial Sequence
  Synthetically generated peptide
CCEAGCNPACTGCY

SEQ ID NO: 4023 - protein, 14 aa, Artificial Sequence
  Synthetically generated peptide
CCERGCNPACTGCY

SEQ ID NO: 4024 - protein, 14 aa, Artificial Sequence
  Synthetically generated peptide
CCENGCNPACTGCY

SEQ ID NO: 4025 - protein, 14 aa, Artificial Sequence
  Synthetically generated peptide
CCEDGCNPACTGCY

SEQ ID NO: 4026 - protein, 14 aa, Artificial Sequence
  Synthetically generated peptide
CCECGCNPACTGCY

SEQ ID NO: 4027 - protein, 14 aa, Artificial Sequence
  Synthetically generated peptide
CCEQGCNPACTGCY

SEQ ID NO: 4028 - protein, 14 aa, Artificial Sequence
  Synthetically generated peptide
CCEEGCNPACTGCY

SEQ ID NO: 4029 - protein, 14 aa, Artificial Sequence
  Synthetically generated peptide
CCEGGCNPACTGCY

SEQ ID NO: 4030 - protein, 14 aa, Artificial Sequence
  Synthetically generated peptide
CCEHGCNPACTGCY

SEQ ID NO: 4031 - protein, 14 aa, Artificial Sequence
  Synthetically generated peptide
CCEIGCNPACTGCY

SEQ ID NO: 4032 - protein, 14 aa, Artificial Sequence
  Synthetically generated peptide
CCEKGCNPACTGCY

SEQ ID NO: 4033 - protein, 14 aa, Artificial Sequence
  Synthetically generated peptide
CCEMGCNPACTGCY

SEQ ID NO: 4034 - protein, 14 aa, Artificial Sequence
  Synthetically generated peptide
CCEFGCNPACTGCY

SEQ ID NO: 4035 - protein, 14 aa, Artificial Sequence
  Synthetically generated peptide
CCEPGCNPACTGCY

SEQ ID NO: 4036 - protein, 14 aa, Artificial Sequence
  Synthetically generated peptide
CCESGCNPACTGCY

SEQ ID NO: 4037 - protein, 14 aa, Artificial Sequence
  Synthetically generated peptide
CCETGCNPACTGCY

SEQ ID NO: 4038 - protein, 14 aa, Artificial Sequence
  Synthetically generated peptide
CCEWGCNPACTGCY

SEQ ID NO: 4039 - protein, 14 aa, Artificial Sequence
  Synthetically generated peptide
CCEYGCNPACTGCY

SEQ ID NO: 4040 - protein, 14 aa, Artificial Sequence
  Synthetically generated peptide
CCEVGCNPACTGCY

SEQ ID NO: 4041 - protein, 13 aa, Artificial Sequence
  Synthetically generated peptide
CCELCCNPACTGG

SEQ ID NO: 4042 - protein, 13 aa, Artificial Sequence
  Synthetically generated peptide
CCEACCNPACTGG

SEQ ID NO: 4043 - protein, 13 aa, Artificial Sequence
  Synthetically generated peptide
CCERCCNPACTGG

SEQ ID NO: 4044 - protein, 13 aa, Artificial Sequence
  Synthetically generated peptide
CCENCCNPACTGG

SEQ ID NO: 4045 - protein, 13 aa, Artificial Sequence
  Synthetically generated peptide
CCEDCCNPACTGG

SEQ ID NO: 4046 - protein, 13 aa, Artificial Sequence
  Synthetically generated peptide
CCECCCNPACTGG

SEQ ID NO: 4047 - protein, 13 aa, Artificial Sequence
  Synthetically generated peptide
CCEQCCNPACTGG

SEQ ID NO: 4048 - protein, 13 aa, Artificial Sequence
  Synthetically generated peptide
CCEECCNPACTGG

SEQ ID NO: 4049 - protein, 13 aa, Artificial Sequence
  Synthetically generated peptide
CCEGCCNPACTGG

SEQ ID NO: 4050 - protein, 13 aa, Artificial Sequence
  Synthetically generated peptide
CCEHCCNPACTGG

SEQ ID NO: 4051 - protein, 13 aa, Artificial Sequence
  Synthetically generated peptide
CCEICCNPACTGG

SEQ ID NO: 4052 - protein, 13 aa, Artificial Sequence
  Synthetically generated peptide
CCEKCCNPACTGG

SEQ ID NO: 4053 - protein, 13 aa, Artificial Sequence
  Synthetically generated peptide
CCEMCCNPACTGG

SEQ ID NO: 4054 - protein, 13 aa, Artificial Sequence
  Synthetically generated peptide
CCEFCCNPACTGG

SEQ ID NO: 4055 - protein, 13 aa, Artificial Sequence
  Synthetically generated peptide
CCEPCCNPACTGG

SEQ ID NO: 4056 - protein, 13 aa, Artificial Sequence
  Synthetically generated peptide
CCESCCNPACTGG

SEQ ID NO: 4057 - protein, 13 aa, Artificial Sequence
  Synthetically generated peptide
CCETCCNPACTGG

SEQ ID NO: 4058 - protein, 13 aa, Artificial Sequence
  Synthetically generated peptide
CCEWCCNPACTGG

SEQ ID NO: 4059 - protein, 13 aa, Artificial Sequence
  Synthetically generated peptide
CCEYCCNPACTGG

SEQ ID NO: 4060 - protein, 13 aa, Artificial Sequence
  Synthetically generated peptide
CCEVCCNPACTGG

SEQ ID NO: 4061 - protein, 14 aa, Artificial Sequence
  Synthetically generated peptide
CCELCCNPACTGGY

SEQ ID NO: 4062 - protein, 14 aa, Artificial Sequence
  Synthetically generated peptide
CCEACCNPACTGGY

SEQ ID NO: 4063 - protein, 14 aa, Artificial Sequence
  Synthetically generated peptide
CCERCCNPACTGGY

SEQ ID NO: 4064 - protein, 14 aa, Artificial Sequence
  Synthetically generated peptide
CCENCCNPACTGGY

SEQ ID NO: 4065 - protein, 14 aa, Artificial Sequence
  Synthetically generated peptide
CCEDCCNPACTGGY

SEQ ID NO: 4066 - protein, 14 aa, Artificial Sequence
  Synthetically generated peptide
CCECCCNPACTGGY

SEQ ID NO: 4067 - protein, 14 aa, Artificial Sequence
  Synthetically generated peptide
CCEQCCNPACTGGY

SEQ ID NO: 4068 - protein, 14 aa, Artificial Sequence
  Synthetically generated peptide
CCEECCNPACTGGY

SEQ ID NO: 4069 - protein, 14 aa, Artificial Sequence
  Synthetically generated peptide
CCEGCCNPACTGGY

SEQ ID NO: 4070 - protein, 14 aa, Artificial Sequence
  Synthetically generated peptide
CCEHCCNPACTGGY

SEQ ID NO: 4071 - protein, 14 aa, Artificial Sequence
  Synthetically generated peptide
CCEICCNPACTGGY

SEQ ID NO: 4072 - protein, 14 aa, Artificial Sequence
  Synthetically generated peptide
CCEKCCNPACTGGY

SEQ ID NO: 4073 - protein, 14 aa, Artificial Sequence
  Synthetically generated peptide
CCEMCCNPACTGGY

SEQ ID NO: 4074 - protein, 14 aa, Artificial Sequence
  Synthetically generated peptide
CCEFCCNPACTGGY

SEQ ID NO: 4075 - protein, 14 aa, Artificial Sequence
  Synthetically generated peptide
CCEPCCNPACTGGY

SEQ ID NO: 4076 - protein, 14 aa, Artificial Sequence
  Synthetically generated peptide
CCESCCNPACTGGY

SEQ ID NO: 4077 - protein, 14 aa, Artificial Sequence
  Synthetically generated peptide
CCETCCNPACTGGY

SEQ ID NO: 4078 - protein, 14 aa, Artificial Sequence
  Synthetically generated peptide
CCEWCCNPACTGGY

SEQ ID NO: 4079 - protein, 14 aa, Artificial Sequence
  Synthetically generated peptide
CCEYCCNPACTGGY

SEQ ID NO: 4080 - protein, 14 aa, Artificial Sequence
  Synthetically generated peptide
CCEVCCNPACTGGY

SEQ ID NO: 4081 - protein, 13 aa, Artificial Sequence
  Synthetically generated peptide
CCELACNPACTGG

SEQ ID NO: 4082 - protein, 13 aa, Artificial Sequence
  Synthetically generated peptide
CCEAACNPACTGG

SEQ ID NO: 4083 - protein, 13 aa, Artificial Sequence
  Synthetically generated peptide
CCERACNPACTGG

SEQ ID NO: 4084 - protein, 13 aa, Artificial Sequence
  Synthetically generated peptide
CCENACNPACTGG

SEQ ID NO: 4085 - protein, 13 aa, Artificial Sequence
  Synthetically generated peptide
CCEDACNPACTGG

SEQ ID NO: 4086 - protein, 13 aa, Artificial Sequence
  Synthetically generated peptide
CCECACNPACTGG

SEQ ID NO: 4087 - protein, 13 aa, Artificial Sequence
  Synthetically generated peptide
CCEQACNPACTGG

SEQ ID NO: 4088 - protein, 13 aa, Artificial Sequence
  Synthetically generated peptide
CCEEACNPACTGG

SEQ ID NO: 4089 - protein, 13 aa, Artificial Sequence
  Synthetically generated peptide
CCEGACNPACTGG

SEQ ID NO: 4090 - protein, 13 aa, Artificial Sequence
  Synthetically generated peptide
CCEHACNPACTGG

SEQ ID NO: 4091 - protein, 13 aa, Artificial Sequence
  Synthetically generated peptide
CCEIACNPACTGG

SEQ ID NO: 4092 - protein, 13 aa, Artificial Sequence
  Synthetically generated peptide
CCEKACNPACTGG

SEQ ID NO: 4093 - protein, 13 aa, Artificial Sequence
  Synthetically generated peptide
CCEMACNPACTGG

SEQ ID NO: 4094 - protein, 13 aa, Artificial Sequence
  Synthetically generated peptide
CCEFACNPACTGG

SEQ ID NO: 4095 - protein, 13 aa, Artificial Sequence
  Synthetically generated peptide
CCEPACNPACTGG

SEQ ID NO: 4096 - protein, 13 aa, Artificial Sequence
  Synthetically generated peptide
CCESACNPACTGG

SEQ ID NO: 4097 - protein, 13 aa, Artificial Sequence
  Synthetically generated peptide
CCETACNPACTGG

SEQ ID NO: 4098 - protein, 13 aa, Artificial Sequence
  Synthetically generated peptide
CCEWACNPACTGG

SEQ ID NO: 4099 - protein, 13 aa, Artificial Sequence
  Synthetically generated peptide
CCEYACNPACTGG

SEQ ID NO: 4100 - protein, 13 aa, Artificial Sequence
  Synthetically generated peptide
CCEVACNPACTGG

SEQ ID NO: 4101 - protein, 14 aa, Artificial Sequence
  Synthetically generated peptide
CCELACNPACTGGY

SEQ ID NO: 4102 - protein, 14 aa, Artificial Sequence
  Synthetically generated peptide
CCEAACNPACTGGY

SEQ ID NO: 4103 - protein, 14 aa, Artificial Sequence
  Synthetically generated peptide
CCERACNPACTGGY

SEQ ID NO: 4104 - protein, 14 aa, Artificial Sequence
  Synthetically generated peptide
CCENACNPACTGGY

SEQ ID NO: 4105 - protein, 14 aa, Artificial Sequence
  Synthetically generated peptide
CCEDACNPACTGGY

SEQ ID NO: 4106 - protein, 14 aa, Artificial Sequence
  Synthetically generated peptide
CCECACNPACTGGY

SEQ ID NO: 4107 - protein, 14 aa, Artificial Sequence
  Synthetically generated peptide
CCEQACNPACTGGY

SEQ ID NO: 4108 - protein, 14 aa, Artificial Sequence
  Synthetically generated peptide
CCEEACNPACTGGY

SEQ ID NO: 4109 - protein, 14 aa, Artificial Sequence
  Synthetically generated peptide
CCEGACNPACTGGY

SEQ ID NO: 4110 - protein, 14 aa, Artificial Sequence
  Synthetically generated peptide
CCEHACNPACTGGY

SEQ ID NO: 4111 - protein, 14 aa, Artificial Sequence
  Synthetically generated peptide
CCEIACNPACTGGY

SEQ ID NO: 4112 - protein, 14 aa, Artificial Sequence
  Synthetically generated peptide
CCEKACNPACTGGY

SEQ ID NO: 4113 - protein, 14 aa, Artificial Sequence
  Synthetically generated peptide
CCEMACNPACTGGY

SEQ ID NO: 4114 - protein, 14 aa, Artificial Sequence
  Synthetically generated peptide
CCEFACNPACTGGY

SEQ ID NO: 4115 - protein, 14 aa, Artificial Sequence
  Synthetically generated peptide
CCEPACNPACTGGY

SEQ ID NO: 4116 - protein, 14 aa, Artificial Sequence
  Synthetically generated peptide
CCESACNPACTGGY

SEQ ID NO: 4117 - protein, 14 aa, Artificial Sequence
  Synthetically generated peptide
CCETACNPACTGGY

SEQ ID NO: 4118 - protein, 14 aa, Artificial Sequence
  Synthetically generated peptide
CCEWACNPACTGGY

SEQ ID NO: 4119 - protein, 14 aa, Artificial Sequence
  Synthetically generated peptide
CCEYACNPACTGGY

SEQ ID NO: 4120 - protein, 14 aa, Artificial Sequence
  Synthetically generated peptide
CCEVACNPACTGGY

SEQ ID NO: 4121 - protein, 13 aa, Artificial Sequence
  Synthetically generated peptide
CCELGCNPACTGA

SEQ ID NO: 4122 - protein, 13 aa, Artificial Sequence
  Synthetically generated peptide
CCEAGCNPACTGA

SEQ ID NO: 4123 - protein, 13 aa, Artificial Sequence
  Synthetically generated peptide
CCERGCNPACTGA

SEQ ID NO: 4124 - protein, 13 aa, Artificial Sequence
  Synthetically generated peptide
CCENGCNPACTGA

SEQ ID NO: 4125 - protein, 13 aa, Artificial Sequence
  Synthetically generated peptide
CCEDGCNPACTGA

SEQ ID NO: 4126 - protein, 13 aa, Artificial Sequence
  Synthetically generated peptide
CCECGCNPACTGA

SEQ ID NO: 4127 - protein, 13 aa, Artificial Sequence
  Synthetically generated peptide
CCEQGCNPACTGA

SEQ ID NO: 4128 - protein, 13 aa, Artificial Sequence
  Synthetically generated peptide
CCEEGCNPACTGA

SEQ ID NO: 4129 - protein, 13 aa, Artificial Sequence
  Synthetically generated peptide
CCEGGCNPACTGA

SEQ ID NO: 4130 - protein, 13 aa, Artificial Sequence
  Synthetically generated peptide
CCEHGCNPACTGA

SEQ ID NO: 4131 - protein, 13 aa, Artificial Sequence
  Synthetically generated peptide
CCEIGCNPACTGA

SEQ ID NO: 4132 - protein, 13 aa, Artificial Sequence
  Synthetically generated peptide
CCEKGCNPACTGA

SEQ ID NO: 4133 - protein, 13 aa, Artificial Sequence
  Synthetically generated peptide
CCEMGCNPACTGA

SEQ ID NO: 4134 - protein, 13 aa, Artificial Sequence
  Synthetically generated peptide
CCEFGCNPACTGA

SEQ ID NO: 4135 - protein, 13 aa, Artificial Sequence
  Synthetically generated peptide
CCEPGCNPACTGA

SEQ ID NO: 4136 - protein, 13 aa, Artificial Sequence
  Synthetically generated peptide
CCESGCNPACTGA

SEQ ID NO: 4137 - protein, 13 aa, Artificial Sequence
  Synthetically generated peptide
CCETGCNPACTGA

SEQ ID NO: 4138 - protein, 13 aa, Artificial Sequence
  Synthetically generated peptide
CCEWGCNPACTGA

SEQ ID NO: 4139 - protein, 13 aa, Artificial Sequence
  Synthetically generated peptide
CCEYGCNPACTGA

SEQ ID NO: 4140 - protein, 13 aa, Artificial Sequence
  Synthetically generated peptide
CCEVGCNPACTGA

SEQ ID NO: 4141 - protein, 14 aa, Artificial Sequence
  Synthetically generated peptide
CCELACNPACTGAY

SEQ ID NO: 4142 - protein, 14 aa, Artificial Sequence
  Synthetically generated peptide
CCEAACNPACTGAY

SEQ ID NO: 4143 - protein, 14 aa, Artificial Sequence
  Synthetically generated peptide
CCERACNPACTGAY

SEQ ID NO: 4144 - protein, 14 aa, Artificial Sequence
  Synthetically generated peptide
CCENACNPACTGAY

SEQ ID NO: 4145 - protein, 14 aa, Artificial Sequence
  Synthetically generated peptide
CCEDACNPACTGAY

SEQ ID NO: 4146 - protein, 14 aa, Artificial Sequence
  Synthetically generated peptide
CCECACNPACTGAY

SEQ ID NO: 4147 - protein, 14 aa, Artificial Sequence
  Synthetically generated peptide
CCEQACNPACTGAY

SEQ ID NO: 4148 - protein, 14 aa, Artificial Sequence
  Synthetically generated peptide
CCEEACNPACTGAY

SEQ ID NO: 4149 - protein, 14 aa, Artificial Sequence
  Synthetically generated peptide
CCEGACNPACTGAY

SEQ ID NO: 4150 - protein, 14 aa, Artificial Sequence
  Synthetically generated peptide
CCEHACNPACTGAY

SEQ ID NO: 4151 - protein, 14 aa, Artificial Sequence
  Synthetically generated peptide
CCEIACNPACTGAY

SEQ ID NO: 4152 - protein, 14 aa, Artificial Sequence
  Synthetically generated peptide
CCEKACNPACTGAY

SEQ ID NO: 4153 - protein, 14 aa, Artificial Sequence
  Synthetically generated peptide
CCEMACNPACTGAY

SEQ ID NO: 4154 - protein, 14 aa, Artificial Sequence
  Synthetically generated peptide
CCEFACNPACTGAY

SEQ ID NO: 4155 - protein, 14 aa, Artificial Sequence
  Synthetically generated peptide
CCEPACNPACTGAY

SEQ ID NO: 4156 - protein, 14 aa, Artificial Sequence
  Synthetically generated peptide
CCESACNPACTGAY

SEQ ID NO: 4157 - protein, 14 aa, Artificial Sequence
  Synthetically generated peptide
CCETACNPACTGAY

SEQ ID NO: 4158 - protein, 14 aa, Artificial Sequence
  Synthetically generated peptide
CCEWACNPACTGAY

SEQ ID NO: 4159 - protein, 14 aa, Artificial Sequence
  Synthetically generated peptide
CCEYACNPACTGAY

SEQ ID NO: 4160 - protein, 14 aa, Artificial Sequence
  Synthetically generated peptide
CCEVACNPACTGAY

SEQ ID NO: 4161 - protein, 12 aa, Artificial Sequence
  Synthetically generated peptide
CCLCCNPACTGC

SEQ ID NO: 4162 - protein, 11 aa, Artificial Sequence
  Synthetically generated peptide
CCCCNPACTGC

SEQ ID NO: 4163 - protein, 11 aa, Artificial Sequence
  Synthetically generated peptide
CCLCCPACTGC

SEQ ID NO: 4164 - protein, 11 aa, Artificial Sequence
  Synthetically generated peptide
CCLCCNACTGC

SEQ ID NO: 4165 - protein, 11 aa, Artificial Sequence
  Synthetically generated peptide
CCLCCNPCTGC

SEQ ID NO: 4166 - protein, 11 aa, Artificial Sequence
  Synthetically generated peptide
CCLCCNPACGC

SEQ ID NO: 4167 - protein, 11 aa, Artificial Sequence
  Synthetically generated peptide
CCLCCNPACTC

SEQ ID NO: 4168 - protein, 12 aa, Artificial Sequence
  Synthetically generated peptide
CCECCNPACTGC

SEQ ID NO: 4169 - protein, 11 aa, Artificial Sequence
  Synthetically generated peptide
CCECCPACTGC

SEQ ID NO: 4170 - protein, 11 aa, Artificial Sequence
  Synthetically generated peptide
CCECCNACTGC

SEQ ID NO: 4171 - protein, 11 aa, Artificial Sequence
  Synthetically generated peptide
CCECCNPCTGC

SEQ ID NO: 4172 - protein, 11 aa, Artificial Sequence
  Synthetically generated peptide
CCECCNPACGC

SEQ ID NO: 4173 - protein, 11 aa, Artificial Sequence
  Synthetically generated peptide
CCECCNPACTC

SEQ ID NO: 4174 - protein, 12 aa, Artificial Sequence
  Synthetically generated peptide
CCELCCPACTGC

SEQ ID NO: 4175 - protein, 11 aa, Artificial Sequence
  Synthetically generated peptide
CCELCCACTGC

SEQ ID NO: 4176 - protein, 11 aa, Artificial Sequence
  Synthetically generated peptide
CCELCCPCTGC

SEQ ID NO: 4177 - protein, 11 aa, Artificial Sequence
  Synthetically generated peptide
CCELCCPACGC

SEQ ID NO: 4178 - protein, 11 aa, Artificial Sequence
  Synthetically generated peptide
CCELCCPACTC

SEQ ID NO: 4179 - protein, 12 aa, Artificial Sequence
  Synthetically generated peptide
CCELCCNACTGC

SEQ ID NO: 4180 - protein, 11 aa, Artificial Sequence
  Synthetically generated peptide
CCELCCNCTGC

SEQ ID NO: 4181 - protein, 11 aa, Artificial Sequence
  Synthetically generated peptide
CCELCCNACGC

SEQ ID NO: 4182 - protein, 11 aa, Artificial Sequence
  Synthetically generated peptide
CCELCCNACTC

SEQ ID NO: 4183 - protein, 12 aa, Artificial Sequence
  Synthetically generated peptide
CCELCCNPCTGC

SEQ ID NO: 4184 - protein, 11 aa, Artificial Sequence
  Synthetically generated peptide
CCELCCNPCGC

SEQ ID NO: 4185 - protein, 11 aa, Artificial Sequence
  Synthetically generated peptide
CCELCCNPCTC

SEQ ID NO: 4186 - protein, 12 aa, Artificial Sequence
  Synthetically generated peptide
CCELCCNPACGC

SEQ ID NO: 4187 - protein, 11 aa, Artificial Sequence
  Synthetically generated peptide
CCELCCNPACC

SEQ ID NO: 4188 - protein, 12 aa, Artificial Sequence
  Synthetically generated peptide
CCELCCNPACTC

SEQ ID NO: 4189 - protein, 12 aa, Artificial Sequence
  Synthetically generated peptide
CCWCCNPACTGC

SEQ ID NO: 4190 - protein, 11 aa, Artificial Sequence
  Synthetically generated peptide
CCCCNPACTGC

SEQ ID NO: 4191 - protein, 11 aa, Artificial Sequence
  Synthetically generated peptide
CCWCCPACTGC

SEQ ID NO: 4192 - protein, 11 aa, Artificial Sequence
  Synthetically generated peptide
CCWCCNACTGC

SEQ ID NO: 4193 - protein, 11 aa, Artificial Sequence
  Synthetically generated peptide
CCWCCNPCTGC

SEQ ID NO: 4194 - protein, 11 aa, Artificial Sequence
  Synthetically generated peptide
CCWCCNPACGC

SEQ ID NO: 4195 - protein, 11 aa, Artificial Sequence
  Synthetically generated peptide
CCWCCNPACTC

SEQ ID NO: 4196 - protein, 12 aa, Artificial Sequence
  Synthetically generated peptide
CCECCNPACTGC

SEQ ID NO: 4197 - protein, 11 aa, Artificial Sequence
  Synthetically generated peptide
CCECCPACTGC

SEQ ID NO: 4198 - protein, 11 aa, Artificial Sequence
  Synthetically generated peptide
CCECCNACTGC

SEQ ID NO: 4199 - protein, 11 aa, Artificial Sequence
  Synthetically generated peptide
CCECCNPCTGC

SEQ ID NO: 4200 - protein, 11 aa, Artificial Sequence
  Synthetically generated peptide
CCECCNPACGC

SEQ ID NO: 4201 - protein, 11 aa, Artificial Sequence
  Synthetically generated peptide
CCECCNPACTC

SEQ ID NO: 4202 - protein, 12 aa, Artificial Sequence
  Synthetically generated peptide
CCEWCCPACTGC

SEQ ID NO: 4203 - protein, 11 aa, Artificial Sequence
  Synthetically generated peptide
CCEWCCACTGC

SEQ ID NO: 4204 - protein, 11 aa, Artificial Sequence
  Synthetically generated peptide
CCEWCCPCTGC

SEQ ID NO: 4205 - protein, 11 aa, Artificial Sequence
  Synthetically generated peptide
CCEWCCPACGC

SEQ ID NO: 4206 - protein, 11 aa, Artificial Sequence
  Synthetically generated peptide
CCEWCCPACTC

SEQ ID NO: 4207 - protein, 12 aa, Artificial Sequence
  Synthetically generated peptide
CCEWCCNACTGC

SEQ ID NO: 4208 - protein, 11 aa, Artificial Sequence
  Synthetically generated peptide
CCEWCCNCTGC

SEQ ID NO: 4209 - protein, 11 aa, Artificial Sequence
  Synthetically generated peptide
CCEWCCNACGC

SEQ ID NO: 4210 - protein, 11 aa, Artificial Sequence
  Synthetically generated peptide
CCEWCCNACTC

SEQ ID NO: 4211 - protein, 12 aa, Artificial Sequence
  Synthetically generated peptide
CCEWCCNPCTGC

SEQ ID NO: 4212 - protein, 11 aa, Artificial Sequence
  Synthetically generated peptide
CCEWCCNPCGC

SEQ ID NO: 4213 - protein, 11 aa, Artificial Sequence
  Synthetically generated peptide
CCEWCCNPCTC

SEQ ID NO: 4214 - protein, 12 aa, Artificial Sequence
  Synthetically generated peptide
CCEWCCNPACGC

SEQ ID NO: 4215 - protein, 11 aa, Artificial Sequence
  Synthetically generated peptide
CCEWCCNPACC

SEQ ID NO: 4216 - protein, 12 aa, Artificial Sequence
  Synthetically generated peptide
CCEWCCNPACTC

SEQ ID NO: 4217 - protein, 12 aa, Artificial Sequence
  Synthetically generated peptide
CCFCCNPACTGC

SEQ ID NO: 4218 - protein, 11 aa, Artificial Sequence
  Synthetically generated peptide
CCCCNPACTGC

SEQ ID NO: 4219 - protein, 11 aa, Artificial Sequence
  Synthetically generated peptide
CCFCCPACTGC

SEQ ID NO: 4220 - protein, 11 aa, Artificial Sequence
  Synthetically generated peptide
CCFCCNACTGC

SEQ ID NO: 4221 - protein, 11 aa, Artificial Sequence
  Synthetically generated peptide
CCFCCNPCTGC

SEQ ID NO: 4222 - protein, 11 aa, Artificial Sequence
  Synthetically generated peptide
CCFCCNPACGC

SEQ ID NO: 4223 - protein, 11 aa, Artificial Sequence
  Synthetically generated peptide
CCFCCNPACTC

SEQ ID NO: 4224 - protein, 12 aa, Artificial Sequence
  Synthetically generated peptide
CCECCNPACTGC

SEQ ID NO: 4225 - protein, 11 aa, Artificial Sequence
  Synthetically generated peptide
CCECCPACTGC

SEQ ID NO: 4226 - protein, 11 aa, Artificial Sequence
  Synthetically generated peptide
CCECCNACTGC

SEQ ID NO: 4227 - protein, 11 aa, Artificial Sequence
  Synthetically generated peptide
CCECCNPCTGC

SEQ ID NO: 4228 - protein, 11 aa, Artificial Sequence
  Synthetically generated peptide
CCECCNPACGC

SEQ ID NO: 4229 - protein, 11 aa, Artificial Sequence
  Synthetically generated peptide
CCECCNPACTC

SEQ ID NO: 4230 - protein, 12 aa, Artificial Sequence
  Synthetically generated peptide
CCEFCCPACTGC

SEQ ID NO: 4231 - protein, 11 aa, Artificial Sequence
  Synthetically generated peptide
CCEFCCACTGC

SEQ ID NO: 4232 - protein, 11 aa, Artificial Sequence
  Synthetically generated peptide
CCEFCCPCTGC

SEQ ID NO: 4233 - protein, 11 aa, Artificial Sequence
  Synthetically generated peptide
CCEFCCPACGC

SEQ ID NO: 4234 - protein, 11 aa, Artificial Sequence
  Synthetically generated peptide
CCEFCCPACTC

SEQ ID NO: 4235 - protein, 12 aa, Artificial Sequence
  Synthetically generated peptide
CCEFCCNACTGC

SEQ ID NO: 4236 - protein, 11 aa, Artificial Sequence
  Synthetically generated peptide
CCEFCCNCTGC

SEQ ID NO: 4237 - protein, 11 aa, Artificial Sequence
  Synthetically generated peptide
CCEFCCNACGC

SEQ ID NO: 4238 - protein, 11 aa, Artificial Sequence
  Synthetically generated peptide
CCEFCCNACTC

SEQ ID NO: 4239 - protein, 12 aa, Artificial Sequence
  Synthetically generated peptide
CCEFCCNPCTGC

SEQ ID NO: 4240 - protein, 11 aa, Artificial Sequence
  Synthetically generated peptide
CCEFCCNPCGC

SEQ ID NO: 4241 - protein, 11 aa, Artificial Sequence
  Synthetically generated peptide
CCEFCCNPCTC

SEQ ID NO: 4242 - protein, 12 aa, Artificial Sequence
  Synthetically generated peptide
CCEFCCNPACGC

SEQ ID NO: 4243 - protein, 11 aa, Artificial Sequence
  Synthetically generated peptide
CCEFCCNPACC

SEQ ID NO: 4244 - protein, 12 aa, Artificial Sequence
  Synthetically generated peptide
CCEFCCNPACTC

SEQ ID NO: 4245 - protein, 14 aa, Artificial Sequence
  Synthetically generated peptide
  VARIANT (1)..(14): Xaa = Any Amino Acid
CCXELCCNPACTGC

SEQ ID NO: 4246 - protein, 15 aa, Artificial Sequence
  Synthetically generated peptide
  VARIANT (1)..(15): Xaa = Any Amino Acid
CCXXELCCNPACTGC

SEQ ID NO: 4247 - protein, 16 aa, Artificial Sequence
  Synthetically generated peptide
  VARIANT (1)..(16): Xaa = Any Amino Acid
CCXXXELCCNPACTGC

SEQ ID NO: 4248 - protein, 17 aa, Artificial Sequence
  Synthetically generated peptide
  VARIANT (1)..(17): Xaa = Any Amino Acid
CCXXXXELCCNPACTGC

SEQ ID NO: 4249 - protein, 17 aa, Artificial Sequence
  Synthetically generated peptide
  VARIANT (1)..(17): Xaa = Any Amino Acid
CCXXXEXLCCNPACTGC

SEQ ID NO: 4250 - protein, 17 aa, Artificial Sequence
  Synthetically generated peptide
  VARIANT (1)..(17): Xaa = Any Amino Acid
CCXXXELXCCNPACTGC

SEQ ID NO: 4251 - protein, 17 aa, Artificial Sequence
  Synthetically generated peptide
  VARIANT (1)..(17): Xaa = Any Amino Acid
CCXXXELCCXNPACTGC

SEQ ID NO: 4252 - protein, 17 aa, Artificial Sequence
  Synthetically generated peptide
  VARIANT (1)..(17): Xaa = Any Amino Acid
CCXXXELCCNXPACTGC

SEQ ID NO: 4253 - protein, 17 aa, Artificial Sequence
  Synthetically generated peptide
  VARIANT (1)..(17): Xaa = Any Amino Acid
CCXXXELCCNPXACTGC

SEQ ID NO: 4254 - protein, 17 aa, Artificial Sequence
  Synthetically generated peptide
  VARIANT (1)..(17): Xaa = Any Amino Acid
CCXXXELCCNPAXCTGC

SEQ ID NO: 4255 - protein, 17 aa, Artificial Sequence
  Synthetically generated peptide
  VARIANT (1)..(17): Xaa = Any Amino Acid
CCXXXELCCNPACXTGC

SEQ ID NO: 4256 - protein, 17 aa, Artificial Sequence
  Synthetically generated peptide
  VARIANT (1)..(17): Xaa = Any Amino Acid
CCXXXELCCNPACTXGC

SEQ ID NO: 4257 - protein, 17 aa, Artificial Sequence
  Synthetically generated peptide
  VARIANT (1)..(17): Xaa = Any Amino Acid
CCXXXELCCNPACTGXC

SEQ ID NO: 4258 - protein, 16 aa, Artificial Sequence
  Synthetically generated peptide
  VARIANT (1)..(16): Xaa = Any Amino Acid
CCXXEXLCCNPACTGC

SEQ ID NO: 4259 - protein, 17 aa, Artificial Sequence
  Synthetically generated peptide
  VARIANT (1)..(17): Xaa = Any Amino Acid
CCXXEXXLCCNPACTGC

SEQ ID NO: 4260 - protein, 17 aa, Artificial Sequence
  Synthetically generated peptide
  VARIANT (1)..(17): Xaa = Any Amino Acid
CCXXEXLXCCNPACTGC

SEQ ID NO: 4261 - protein, 17 aa, Artificial Sequence
  Synthetically generated peptide
  VARIANT (1)..(17): Xaa = Any Amino Acid
CCXXEXLCCXNPACTGC

SEQ ID NO: 4262 - protein, 17 aa, Artificial Sequence
  Synthetically generated peptide
  VARIANT (1)..(17): Xaa = Any Amino Acid
CCXXEXLCCNXPACTGC

SEQ ID NO: 4263 - protein, 17 aa, Artificial Sequence
  Synthetically generated peptide
  VARIANT (1)..(17): Xaa = Any Amino Acid
CCXXEXLCCNPXACTGC

SEQ ID NO: 4264 - protein, 17 aa, Artificial Sequence
  Synthetically generated peptide
  VARIANT (1)..(17): Xaa = Any Amino Acid
CCXXEXLCCNPAXCTGC

SEQ ID NO: 4265 - protein, 17 aa, Artificial Sequence
  Synthetically generated peptide
  VARIANT (1)..(17): Xaa = Any Amino Acid
CCXXEXLCCNPACXTGC

SEQ ID NO: 4266 - protein, 17 aa, Artificial Sequence
  Synthetically generated peptide
  VARIANT (1)..(17): Xaa = Any Amino Acid
CCXXEXLCCNPACTXGC

SEQ ID NO: 4267 - protein, 17 aa, Artificial Sequence
  Synthetically generated peptide
  VARIANT (1)..(17): Xaa = Any Amino Acid
CCXXEXLCCNPACTGXC

SEQ ID NO: 4268 - protein, 16 aa, Artificial Sequence
  Synthetically generated peptide
  VARIANT (1)..(16): Xaa = Any Amino Acid
CCXXELXCCNPACTGC

SEQ ID NO: 4269 - protein, 17 aa, Artificial Sequence
  Synthetically generated peptide
  VARIANT (1)..(17): Xaa = Any Amino Acid
CCXXELXXCCNPACTGC

SEQ ID NO: 4270 - protein, 17 aa, Artificial Sequence
  Synthetically generated peptide
  VARIANT (1)..(17): Xaa = Any Amino Acid
CCXXELXCCXNPACTGC

SEQ ID NO: 4271 - protein, 17 aa, Artificial Sequence
  Synthetically generated peptide
  VARIANT (1)..(17): Xaa = Any Amino Acid
CCXXELXCCNXPACTGC

SEQ ID NO: 4272 - protein, 17 aa, Artificial Sequence
  Synthetically generated peptide
  VARIANT (1)..(17): Xaa = Any Amino Acid
CCXXELXCCNPXACTGC

SEQ ID NO: 4273 - protein, 17 aa, Artificial Sequence
  Synthetically generated peptide
  VARIANT (1)..(17): Xaa = Any Amino Acid
CCXXELXCCNPAXCTGC

SEQ ID NO: 4274 - protein, 17 aa, Artificial Sequence
  Synthetically generated peptide
  VARIANT (1)..(17): Xaa = Any Amino Acid
CCXXELXCCNPACXTGC

SEQ ID NO: 4275 - protein, 17 aa, Artificial Sequence
  Synthetically generated peptide
  VARIANT (1)..(17): Xaa = Any Amino Acid
CCXXELXCCNPACTXGC

SEQ ID NO: 4276 - protein, 17 aa, Artificial Sequence
  Synthetically generated peptide
  VARIANT (1)..(17): Xaa = Any Amino Acid
CCXXELXCCNPACTGXC

SEQ ID NO: 4277 - protein, 16 aa, Artificial Sequence
  Synthetically generated peptide
  VARIANT (1)..(16): Xaa = Any Amino Acid
CCXXELCCXNPACTGC

SEQ ID NO: 4278 - protein, 17 aa, Artificial Sequence
  Synthetically generated peptide
  VARIANT (1)..(17): Xaa = Any Amino Acid
CCXXELCCXXNPACTGC

SEQ ID NO: 4279 - protein, 17 aa, Artificial Sequence
  Synthetically generated peptide
  VARIANT (1)..(17): Xaa = Any Amino Acid
CCXXELCCXNXPACTGC

SEQ ID NO: 4280 - protein, 17 aa, Artificial Sequence
  Synthetically generated peptide
  VARIANT (1)..(17): Xaa = Any Amino Acid
CCXXELCCXNPXACTGC

SEQ ID NO: 4281 - protein, 17 aa, Artificial Sequence
  Synthetically generated peptide
  VARIANT (1)..(17): Xaa = Any Amino Acid
CCXXELCCXNPAXCTGC

SEQ ID NO: 4282 - protein, 17 aa, Artificial Sequence
  Synthetically generated peptide
  VARIANT (1)..(17): Xaa = Any Amino Acid
CCXXELCCXNPACXTGC

SEQ ID NO: 4283 - protein, 17 aa, Artificial Sequence
  Synthetically generated peptide
  VARIANT (1)..(17): Xaa = Any Amino Acid
CCXXELCCXNPACTXGC

SEQ ID NO: 4284 - protein, 17 aa, Artificial Sequence
  Synthetically generated peptide
  VARIANT (1)..(17): Xaa = Any Amino Acid
CCXXELCCXNPACTGXC

SEQ ID NO: 4285 - protein, 16 aa, Artificial Sequence
  Synthetically generated peptide
  VARIANT (1)..(16): Xaa = Any Amino Acid
CCXXELCCNXPACTGC

SEQ ID NO: 4286 - protein, 17 aa, Artificial Sequence
  Synthetically generated peptide
  VARIANT (1)..(17): Xaa = Any Amino Acid
CCXXELCCNXXPACTGC

SEQ ID NO: 4287 - protein, 17 aa, Artificial Sequence
  Synthetically generated peptide
  VARIANT (1)..(17): Xaa = Any Amino Acid
CCXXELCCNXPXACTGC

SEQ ID NO: 4288 - protein, 17 aa, Artificial Sequence
  Synthetically generated peptide
  VARIANT (1)..(17): Xaa = Any Amino Acid
CCXXELCCNXPAXCTGC

SEQ ID NO: 4289 - protein, 17 aa, Artificial Sequence
  Synthetically generated peptide
  VARIANT (1)..(17): Xaa = Any Amino Acid
CCXXELCCNXPACXTGC

SEQ ID NO: 4290 - protein, 17 aa, Artificial Sequence
  Synthetically generated peptide
  VARIANT (1)..(17): Xaa = Any Amino Acid
CCXXELCCNXPACTXGC

SEQ ID NO: 4291 - protein, 17 aa, Artificial Sequence
  Synthetically generated peptide
  VARIANT (1)..(17): Xaa = Any Amino Acid
CCXXELCCNXPACTGXC

SEQ ID NO: 4292 - protein, 16 aa, Artificial Sequence
  Synthetically generated peptide
  VARIANT (1)..(16): Xaa = Any Amino Acid
CCXXELCCNPXACTGC

SEQ ID NO: 4293 - protein, 17 aa, Artificial Sequence
  Synthetically generated peptide
  VARIANT (1)..(17): Xaa = Any Amino Acid
CCXXELCCNPXXACTGC

SEQ ID NO: 4294 - protein, 17 aa, Artificial Sequence
  Synthetically generated peptide
  VARIANT (1)..(17): Xaa = Any Amino Acid
CCXXELCCNPXAXCTGC

SEQ ID NO: 4295 - protein, 17 aa, Artificial Sequence
  Synthetically generated peptide
  VARIANT (1)..(17): Xaa = Any Amino Acid
CCXXELCCNPXACXTGC

SEQ ID NO: 4296 - protein, 17 aa, Artificial Sequence
  Synthetically generated peptide
  VARIANT (1)..(17): Xaa = Any Amino Acid
CCXXELCCNPXACTXGC

SEQ ID NO: 4297 - protein, 17 aa, Artificial Sequence
  Synthetically generated peptide
  VARIANT (1)..(17): Xaa = Any Amino Acid
CCXXELCCNPXACTGXC

SEQ ID NO: 4298 - protein, 16 aa, Artificial Sequence
  Synthetically generated peptide
  VARIANT (1)..(16): Xaa = Any Amino Acid
CCXXELCCNPAXCTGC

SEQ ID NO: 4299 - protein, 17 aa, Artificial Sequence
  Synthetically generated peptide
  VARIANT (1)..(17): Xaa = Any Amino Acid
CCXXELCCNPAXXCTGC

SEQ ID NO: 4300 - protein, 17 aa, Artificial Sequence
  Synthetically generated peptide
  VARIANT (1)..(17): Xaa = Any Amino Acid
CCXXELCCNPAXCXTGC

SEQ ID NO: 4301 - protein, 17 aa, Artificial Sequence
  Synthetically generated peptide
  VARIANT (1)..(17): Xaa = Any Amino Acid
CCXXELCCNPAXCTXGC

SEQ ID NO: 4302 - protein, 17 aa, Artificial Sequence
  Synthetically generated peptide
  VARIANT (1)..(17): Xaa = Any Amino Acid
CCXXELCCNPAXCTGXC

SEQ ID NO: 4303 - protein, 16 aa, Artificial Sequence
  Synthetically generated peptide
  VARIANT (1)..(16): Xaa = Any Amino Acid
CCXXELCCNPACXTGC

SEQ ID NO: 4304 - protein, 17 aa, Artificial Sequence
  Synthetically generated peptide
  VARIANT (1)..(17): Xaa = Any Amino Acid
CCXXELCCNPACXXTGC

SEQ ID NO: 4305 - protein, 17 aa, Artificial Sequence
  Synthetically generated peptide
  VARIANT (1)..(17): Xaa = Any Amino Acid
CCXXELCCNPACXTXGC

SEQ ID NO: 4306 - protein, 17 aa, Artificial Sequence
  Synthetically generated peptide
  VARIANT (1)..(17): Xaa = Any Amino Acid
CCXXELCCNPACXTGXC

SEQ ID NO: 4307 - protein, 16 aa, Artificial Sequence
  Synthetically generated peptide
  VARIANT (1)..(16): Xaa = Any Amino Acid
CCXXELCCNPACTXGC

SEQ ID NO: 4308 - protein, 17 aa, Artificial Sequence
  Synthetically generated peptide
  VARIANT (1)..(17): Xaa = Any Amino Acid
CCXXELCCNPACTXXGC

SEQ ID NO: 4309 - protein, 17 aa, Artificial Sequence
  Synthetically generated peptide
  VARIANT (1)..(17): Xaa = Any Amino Acid
CCXXELCCNPACTXGXC

SEQ ID NO: 4310 - protein, 16 aa, Artificial Sequence
  Synthetically generated peptide
  VARIANT (1)..(16): Xaa = Any Amino Acid
CCXXELCCNPACTGXC

SEQ ID NO: 4311 - protein, 17 aa, Artificial Sequence
  Synthetically generated peptide
  VARIANT (1)..(17): Xaa = Any Amino Acid
CCXXELCCNPACTGXXC

SEQ ID NO: 4312 - protein, 15 aa, Artificial Sequence
  Synthetically generated peptide
  VARIANT (1)..(15): Xaa = Any Amino Acid
CCXEXLCCNPACTGC

SEQ ID NO: 4313 - protein, 16 aa, Artificial Sequence
  Synthetically generated peptide
  VARIANT (1)..(16): Xaa = Any Amino Acid
CCXEXXLCCNPACTGC

SEQ ID NO: 4314 - protein, 17 aa, Artificial Sequence
  Synthetically generated peptide
  VARIANT (1)..(17): Xaa = Any Amino Acid
CCXEXXXLCCNPACTGC

SEQ ID NO: 4315 - protein, 17 aa, Artificial Sequence
  Synthetically generated peptide
  VARIANT (1)..(17): Xaa = Any Amino Acid
CCXEXXLXCCNPACTGC

SEQ ID NO: 4316 - protein, 17 aa, Artificial Sequence
  Synthetically generated peptide
  VARIANT (1)..(17): Xaa = Any Amino Acid
CCXEXXLCCXNPACTGC

SEQ ID NO: 4317 - protein, 17 aa, Artificial Sequence
  Synthetically generated peptide
  VARIANT (1)..(17): Xaa = Any Amino Acid
CCXEXXLCCNXPACTGC

SEQ ID NO: 4318 - protein, 17 aa, Artificial Sequence
  Synthetically generated peptide
  VARIANT (1)..(17): Xaa = Any Amino Acid
CCXEXXLCCNPXACTGC

SEQ ID NO: 4319 - protein, 17 aa, Artificial Sequence
  Synthetically generated peptide
  VARIANT (1)..(17): Xaa = Any Amino Acid
CCXEXXLCCNPAXCTGC

SEQ ID NO: 4320 - protein, 17 aa, Artificial Sequence
  Synthetically generated peptide
  VARIANT (1)..(17): Xaa = Any Amino Acid
CCXEXXLCCNPACXTGC

SEQ ID NO: 4321 - protein, 17 aa, Artificial Sequence
  Synthetically generated peptide
  VARIANT (1)..(17): Xaa = Any Amino Acid
CCXEXXLCCNPACTXGC

SEQ ID NO: 4322 - protein, 17 aa, Artificial Sequence
  Synthetically generated peptide
  VARIANT (1)..(17): Xaa = Any Amino Acid
CCXEXXLCCNPACTGXC

SEQ ID NO: 4323 - protein, 16 aa, Artificial Sequence
  Synthetically generated peptide
  VARIANT (1)..(16): Xaa = Any Amino Acid
CCXEXLXCCNPACTGC

SEQ ID NO: 4324 - protein, 17 aa, Artificial Sequence
  Synthetically generated peptide
  VARIANT (1)..(17): Xaa = Any Amino Acid
CCXEXLXXCCNPACTGC

SEQ ID NO: 4325 - protein, 17 aa, Artificial Sequence
  Synthetically generated peptide
  VARIANT (1)..(17): Xaa = Any Amino Acid
CCXEXLXCCXNPACTGC

SEQ ID NO: 4326 - protein, 17 aa, Artificial Sequence
  Synthetically generated peptide
  VARIANT (1)..(17): Xaa = Any Amino Acid
CCXEXLXCCNXPACTGC

SEQ ID NO: 4327 - protein, 17 aa, Artificial Sequence
  Synthetically generated peptide
  VARIANT (1)..(17): Xaa = Any Amino Acid
CCXEXLXCCNPXACTGC

SEQ ID NO: 4328 - protein, 17 aa, Artificial Sequence
  Synthetically generated peptide
  VARIANT (1)..(17): Xaa = Any Amino Acid
CCXEXLXCCNPAXCTGC

SEQ ID NO: 4329 - protein, 17 aa, Artificial Sequence
  Synthetically generated peptide
  VARIANT (1)..(17): Xaa = Any Amino Acid
CCXEXLXCCNPACXTGC

SEQ ID NO: 4330 - protein, 17 aa, Artificial Sequence
  Synthetically generated peptide
  VARIANT (1)..(17): Xaa = Any Amino Acid
CCXEXLXCCNPACTXGC

SEQ ID NO: 4331 - protein, 17 aa, Artificial Sequence
  Synthetically generated peptide
  VARIANT (1)..(17): Xaa = Any Amino Acid
CCXEXLXCCNPACTGXC

SEQ ID NO: 4332 - protein, 16 aa, Artificial Sequence
  Synthetically generated peptide
  VARIANT (1)..(16): Xaa = Any Amino Acid
CCXEXLCCXNPACTGC

SEQ ID NO: 4333 - protein, 17 aa, Artificial Sequence
  Synthetically generated peptide
  VARIANT (1)..(17): Xaa = Any Amino Acid
CCXEXLCCXXNPACTGC

SEQ ID NO: 4334 - protein, 17 aa, Artificial Sequence
  Synthetically generated peptide
  VARIANT (1)..(17): Xaa = Any Amino Acid
CCXEXLCCXNXPACTGC

SEQ ID NO: 4335 - protein, 17 aa, Artificial Sequence
  Synthetically generated peptide
  VARIANT (1)..(17): Xaa = Any Amino Acid
CCXEXLCCXNPXACTGC

SEQ ID NO: 4336 - protein, 17 aa, Artificial Sequence
  Synthetically generated peptide
  VARIANT (1)..(17): Xaa = Any Amino Acid
CCXEXLCCXNPAXCTGC

SEQ ID NO: 4337 - protein, 17 aa, Artificial Sequence
  Synthetically generated peptide
  VARIANT (1)..(17): Xaa = Any Amino Acid
CCXEXLCCXNPACXTGC

SEQ ID NO: 4338 - protein, 17 aa, Artificial Sequence
  Synthetically generated peptide
  VARIANT (1)..(17): Xaa = Any Amino Acid
CCXEXLCCXNPACTXGC

SEQ ID NO: 4339 - protein, 17 aa, Artificial Sequence
  Synthetically generated peptide
  VARIANT (1)..(17): Xaa = Any Amino Acid
CCXEXLCCXNPACTGXC

SEQ ID NO: 4340 - protein, 16 aa, Artificial Sequence
  Synthetically generated peptide
  VARIANT (1)..(16): Xaa = Any Amino Acid
CCXEXLCCNXPACTGC

SEQ ID NO: 4341 - protein, 17 aa, Artificial Sequence
  Synthetically generated peptide
  VARIANT (1)..(17): Xaa = Any Amino Acid
CCXEXLCCNXXPACTGC

SEQ ID NO: 4342 - protein, 17 aa, Artificial Sequence
  Synthetically generated peptide
  VARIANT (1)..(17): Xaa = Any Amino Acid
CCXEXLCCNXPXACTGC

SEQ ID NO: 4343 - protein, 17 aa, Artificial Sequence
  Synthetically generated peptide
  VARIANT (1)..(17): Xaa = Any Amino Acid
CCXEXLCCNXPAXCTGC

SEQ ID NO: 4344 - protein, 17 aa, Artificial Sequence
  Synthetically generated peptide
  VARIANT (1)..(17): Xaa = Any Amino Acid
CCXEXLCCNXPACXTGC

SEQ ID NO: 4345 - protein, 17 aa, Artificial Sequence
  Synthetically generated peptide
  VARIANT (1)..(17): Xaa = Any Amino Acid
CCXEXLCCNXPACTXGC

SEQ ID NO: 4346 - protein, 17 aa, Artificial Sequence
  Synthetically generated peptide
  VARIANT (1)..(17): Xaa = Any Amino Acid
CCXEXLCCNXPACTGXC

SEQ ID NO: 4347 - protein, 16 aa, Artificial Sequence
  Synthetically generated peptide
  VARIANT (1)..(16): Xaa = Any Amino Acid
CCXEXLCCNPXACTGC

SEQ ID NO: 4348 - protein, 17 aa, Artificial Sequence
  Synthetically generated peptide
  VARIANT (1)..(17): Xaa = Any Amino Acid
CCXEXLCCNPXXACTGC

SEQ ID NO: 4349 - protein, 17 aa, Artificial Sequence
  Synthetically generated peptide
  VARIANT (1)..(17): Xaa = Any Amino Acid
CCXEXLCCNPXAXCTGC

SEQ ID NO: 4350 - protein, 17 aa, Artificial Sequence
  Synthetically generated peptide
  VARIANT (1)..(17): Xaa = Any Amino Acid
CCXEXLCCNPXACXTGC

SEQ ID NO: 4351 - protein, 17 aa, Artificial Sequence
  Synthetically generated peptide
  VARIANT (1)..(17): Xaa = Any Amino Acid
CCXEXLCCNPXACTXGC

SEQ ID NO: 4352 - protein, 17 aa, Artificial Sequence
  Synthetically generated peptide
  VARIANT (1)..(17): Xaa = Any Amino Acid
CCXEXLCCNPXACTGXC

SEQ ID NO: 4353 - protein, 16 aa, Artificial Sequence
  Synthetically generated peptide
  VARIANT (1)..(16): Xaa = Any Amino Acid
CCXEXLCCNPAXCTGC

SEQ ID NO: 4354 - protein, 17 aa, Artificial Sequence
  Synthetically generated peptide
  VARIANT (1)..(17): Xaa = Any Amino Acid
CCXEXLCCNPAXXCTGC

SEQ ID NO: 4355 - protein, 17 aa, Artificial Sequence
  Synthetically generated peptide
  VARIANT (1)..(17): Xaa = Any Amino Acid
CCXEXLCCNPAXCXTGC

SEQ ID NO: 4356 - protein, 17 aa, Artificial Sequence
  Synthetically generated peptide
  VARIANT (1)..(17): Xaa = Any Amino Acid
CCXEXLCCNPAXCTXGC

SEQ ID NO: 4357 - protein, 17 aa, Artificial Sequence
  Synthetically generated peptide
  VARIANT (1)..(17): Xaa = Any Amino Acid
CCXEXLCCNPAXCTGXC

SEQ ID NO: 4358 - protein, 16 aa, Artificial Sequence
  Synthetically generated peptide
  VARIANT (1)..(16): Xaa = Any Amino Acid
CCXEXLCCNPACXTGC

SEQ ID NO: 4359 - protein, 17 aa, Artificial Sequence
  Synthetically generated peptide
  VARIANT (1)..(17): Xaa = Any Amino Acid
CCXEXLCCNPACXXTGC

SEQ ID NO: 4360 - protein, 17 aa, Artificial Sequence
  Synthetically generated peptide
  VARIANT (1)..(17): Xaa = Any Amino Acid
CCXEXLCCNPACXTXGC

SEQ ID NO: 4361 - protein, 17 aa, Artificial Sequence
  Synthetically generated peptide
  VARIANT (1)..(17): Xaa = Any Amino Acid
CCXEXLCCNPACXTGXC

SEQ ID NO: 4362 - protein, 16 aa, Artificial Sequence
  Synthetically generated peptide
  VARIANT (1)..(16): Xaa = Any Amino Acid
CCXEXLCCNPACTXGC

SEQ ID NO: 4363 - protein, 17 aa, Artificial Sequence
  Synthetically generated peptide
  VARIANT (1)..(17): Xaa = Any Amino Acid
CCXEXLCCNPACTXXGC

SEQ ID NO: 4364 - protein, 17 aa, Artificial Sequence
  Synthetically generated peptide
  VARIANT (1)..(17): Xaa = Any Amino Acid
CCXEXLCCNPACTXGXC

SEQ ID NO: 4365 - protein, 16 aa, Artificial Sequence
  Synthetically generated peptide
  VARIANT (1)..(16): Xaa = Any Amino Acid
CCXEXLCCNPACTGXC

SEQ ID NO: 4366 - protein, 17 aa, Artificial Sequence
  Synthetically generated peptide
  VARIANT (1)..(17): Xaa = Any Amino Acid
CCXEXLCCNPACTGXXC

SEQ ID NO: 4367 - protein, 15 aa, Artificial Sequence
  Synthetically generated peptide
  VARIANT (1)..(15): Xaa = Any Amino Acid
CCXELXCCNPACTGC

SEQ ID NO: 4368 - protein, 16 aa, Artificial Sequence
  Synthetically generated peptide
  VARIANT (1)..(16): Xaa = Any Amino Acid
CCXELXXCCNPACTGC

SEQ ID NO: 4369 - protein, 17 aa, Artificial Sequence
  Synthetically generated peptide
  VARIANT (1)..(17): Xaa = Any Amino Acid
CCXELXXXCCNPACTGC

SEQ ID NO: 4370 - protein, 17 aa, Artificial Sequence
  Synthetically generated peptide
  VARIANT (1)..(17): Xaa = Any Amino Acid
CCXELXXCCXNPACTGC

SEQ ID NO: 4371 - protein, 17 aa, Artificial Sequence
  Synthetically generated peptide
  VARIANT (1)..(17): Xaa = Any Amino Acid
CCXELXXCCNXPACTGC

SEQ ID NO: 4372 - protein, 17 aa, Artificial Sequence
  Synthetically generated peptide
  VARIANT (1)..(17): Xaa = Any Amino Acid
CCXELXXCCNPXACTGC

SEQ ID NO: 4373 - protein, 17 aa, Artificial Sequence
  Synthetically generated peptide
  VARIANT (1)..(17): Xaa = Any Amino Acid
CCXELXXCCNPAXCTGC

SEQ ID NO: 4374 - protein, 17 aa, Artificial Sequence
  Synthetically generated peptide
  VARIANT (1)..(17): Xaa = Any Amino Acid
CCXELXXCCNPACXTGC

SEQ ID NO: 4375 - protein, 17 aa, Artificial Sequence
  Synthetically generated peptide
  VARIANT (1)..(17): Xaa = Any Amino Acid
CCXELXXCCNPACTXGC

SEQ ID NO: 4376 - protein, 17 aa, Artificial Sequence
  Synthetically generated peptide
  VARIANT (1)..(17): Xaa = Any Amino Acid
CCXELXXCCNPACTGXC

SEQ ID NO: 4377 - protein, 16 aa, Artificial Sequence
  Synthetically generated peptide
  VARIANT (1)..(16): Xaa = Any Amino Acid
CCXELXCCXNPACTGC

SEQ ID NO: 4378 - protein, 17 aa, Artificial Sequence
  Synthetically generated peptide
  VARIANT (1)..(17): Xaa = Any Amino Acid
CCXELXCCXXNPACTGC

SEQ ID NO: 4379 - protein, 17 aa, Artificial Sequence
  Synthetically generated peptide
  VARIANT (1)..(17): Xaa = Any Amino Acid
CCXELXCCXNXPACTGC

SEQ ID NO: 4380 - protein, 17 aa, Artificial Sequence
  Synthetically generated peptide
  VARIANT (1)..(17): Xaa = Any Amino Acid
CCXELXCCXNPXACTGC

SEQ ID NO: 4381 - protein, 17 aa, Artificial Sequence
  Synthetically generated peptide
  VARIANT (1)..(17): Xaa = Any Amino Acid
CCXELXCCXNPAXCTGC

SEQ ID NO: 4382 - protein, 17 aa, Artificial Sequence
  Synthetically generated peptide
  VARIANT (1)..(17): Xaa = Any Amino Acid
CCXELXCCXNPACXTGC

SEQ ID NO: 4383 - protein, 17 aa, Artificial Sequence
  Synthetically generated peptide
  VARIANT (1)..(17): Xaa = Any Amino Acid
CCXELXCCXNPACTXGC

SEQ ID NO: 4384 - protein, 17 aa, Artificial Sequence
  Synthetically generated peptide
  VARIANT (1)..(17): Xaa = Any Amino Acid
CCXELXCCXNPACTGXC

SEQ ID NO: 4385 - protein, 16 aa, Artificial Sequence
  Synthetically generated peptide
  VARIANT (1)..(16): Xaa = Any Amino Acid
CCXELXCCNXPACTGC

SEQ ID NO: 4386 - protein, 17 aa, Artificial Sequence
  Synthetically generated peptide
  VARIANT (1)..(17): Xaa = Any Amino Acid
CCXELXCCNXXPACTGC

SEQ ID NO: 4387 - protein, 17 aa, Artificial Sequence
  Synthetically generated peptide
  VARIANT (1)..(17): Xaa = Any Amino Acid
CCXELXCCNXPXACTGC

SEQ ID NO: 4388 - protein, 17 aa, Artificial Sequence
  Synthetically generated peptide
  VARIANT (1)..(17): Xaa = Any Amino Acid
CCXELXCCNXPAXCTGC

SEQ ID NO: 4389 - protein, 17 aa, Artificial Sequence
  Synthetically generated peptide
  VARIANT (1)..(17): Xaa = Any Amino Acid
CCXELXCCNXPACXTGC

SEQ ID NO: 4390 - protein, 17 aa, Artificial Sequence
  Synthetically generated peptide
  VARIANT (1)..(17): Xaa = Any Amino Acid
CCXELXCCNXPACTXGC

SEQ ID NO: 4391 - protein, 17 aa, Artificial Sequence
  Synthetically generated peptide
  VARIANT (1)..(17): Xaa = Any Amino Acid
CCXELXCCNXPACTGXC

SEQ ID NO: 4392 - protein, 16 aa, Artificial Sequence
  Synthetically generated peptide
  VARIANT (1)..(16): Xaa = Any Amino Acid
CCXELXCCNPXACTGC

SEQ ID NO: 4393 - protein, 17 aa, Artificial Sequence
  Synthetically generated peptide
  VARIANT (1)..(17): Xaa = Any Amino Acid
CCXELXCCNPXXACTGC

SEQ ID NO: 4394 - protein, 17 aa, Artificial Sequence
  Synthetically generated peptide
  VARIANT (1)..(17): Xaa = Any Amino Acid
CCXELXCCNPXAXCTGC

SEQ ID NO: 4395 - protein, 17 aa, Artificial Sequence
  Synthetically generated peptide
  VARIANT (1)..(17): Xaa = Any Amino Acid
CCXELXCCNPXACXTGC

SEQ ID NO: 4396 - protein, 17 aa, Artificial Sequence
  Synthetically generated peptide
  VARIANT (1)..(17): Xaa = Any Amino Acid
CCXELXCCNPXACTXGC

SEQ ID NO: 4397 - protein, 17 aa, Artificial Sequence
  Synthetically generated peptide
  VARIANT (1)..(17): Xaa = Any Amino Acid
CCXELXCCNPXACTGXC

SEQ ID NO: 4398 - protein, 16 aa, Artificial Sequence
  Synthetically generated peptide
  VARIANT (1)..(16): Xaa = Any Amino Acid
CCXELXCCNPAXCTGC

SEQ ID NO: 4399 - protein, 17 aa, Artificial Sequence
  Synthetically generated peptide
  VARIANT (1)..(17): Xaa = Any Amino Acid
CCXELXCCNPAXXCTGC

SEQ ID NO: 4400 - protein, 17 aa, Artificial Sequence
  Synthetically generated peptide
  VARIANT (1)..(17): Xaa = Any Amino Acid
CCXELXCCNPAXCXTGC

SEQ ID NO: 4401 - protein, 17 aa, Artificial Sequence
  Synthetically generated peptide
  VARIANT (1)..(17): Xaa = Any Amino Acid
CCXELXCCNPAXCTXGC

SEQ ID NO: 4402 - protein, 17 aa, Artificial Sequence
  Synthetically generated peptide
  VARIANT (1)..(17): Xaa = Any Amino Acid
CCXELXCCNPAXCTGXC

SEQ ID NO: 4403 - protein, 16 aa, Artificial Sequence
  Synthetically generated peptide
  VARIANT (1)..(16): Xaa = Any Amino Acid
CCXELXCCNPACXTGC

SEQ ID NO: 4404 - protein, 17 aa, Artificial Sequence
  Synthetically generated peptide
  VARIANT (1)..(17): Xaa = Any Amino Acid
CCXELXCCNPACXXTGC

SEQ ID NO: 4405 - protein, 17 aa, Artificial Sequence
  Synthetically generated peptide
  VARIANT (1)..(17): Xaa = Any Amino Acid
CCXELXCCNPACXTXGC

SEQ ID NO: 4406 - protein, 17 aa, Artificial Sequence
  Synthetically generated peptide
  VARIANT (1)..(17): Xaa = Any Amino Acid
CCXELXCCNPACXTGXC

SEQ ID NO: 4407 - protein, 16 aa, Artificial Sequence
  Synthetically generated peptide
  VARIANT (1)..(16): Xaa = Any Amino Acid
CCXELXCCNPACTXGC

SEQ ID NO: 4408 - protein, 17 aa, Artificial Sequence
  Synthetically generated peptide
  VARIANT (1)..(17): Xaa = Any Amino Acid
CCXELXCCNPACTXXGC

SEQ ID NO: 4409 - protein, 17 aa, Artificial Sequence
  Synthetically generated peptide
  VARIANT (1)..(17): Xaa = Any Amino Acid
CCXELXCCNPACTXGXC

SEQ ID NO: 4410 - protein, 16 aa, Artificial Sequence
  Synthetically generated peptide
  VARIANT (1)..(16): Xaa = Any Amino Acid
CCXELXCCNPACTGXC

SEQ ID NO: 4411 - protein, 17 aa, Artificial Sequence
  Synthetically generated peptide
  VARIANT (1)..(17): Xaa = Any Amino Acid
CCXELXCCNPACTGXXC

SEQ ID NO: 4412 - protein, 15 aa, Artificial Sequence
  Synthetically generated peptide
  VARIANT (1)..(15): Xaa = Any Amino Acid
CCXELCCXNPACTGC

SEQ ID NO: 4413 - protein, 16 aa, Artificial Sequence
  Synthetically generated peptide
  VARIANT (1)..(16): Xaa = Any Amino Acid
CCXELCCXXNPACTGC

SEQ ID NO: 4414 - protein, 17 aa, Artificial Sequence
  Synthetically generated peptide
  VARIANT (1)..(17): Xaa = Any Amino Acid
CCXELCCXXXNPACTGC

SEQ ID NO: 4415 - protein, 17 aa, Artificial Sequence
  Synthetically generated peptide
  VARIANT (1)..(17): Xaa = Any Amino Acid
CCXELCCXXNXPACTGC

SEQ ID NO: 4416 - protein, 17 aa, Artificial Sequence
  Synthetically generated peptide
  VARIANT (1)..(17): Xaa = Any Amino Acid
CCXELCCXXNPXACTGC

SEQ ID NO: 4417 - protein, 17 aa, Artificial Sequence
  Synthetically generated peptide
  VARIANT (1)..(17): Xaa = Any Amino Acid
CCXELCCXXNPAXCTGC

SEQ ID NO: 4418 - protein, 17 aa, Artificial Sequence
  Synthetically generated peptide
  VARIANT (1)..(17): Xaa = Any Amino Acid
CCXELCCXXNPACXTGC

SEQ ID NO: 4419 - protein, 17 aa, Artificial Sequence
  Synthetically generated peptide
  VARIANT (1)..(17): Xaa = Any Amino Acid
CCXELCCXXNPACTXGC

SEQ ID NO: 4420 - protein, 17 aa, Artificial Sequence
  Synthetically generated peptide
  VARIANT (1)..(17): Xaa = Any Amino Acid
CCXELCCXXNPACTGXC

SEQ ID NO: 4421 - protein, 16 aa, Artificial Sequence
  Synthetically generated peptide
  VARIANT (1)..(16): Xaa = Any Amino Acid
CCXELCCXNXPACTGC

SEQ ID NO: 4422 - protein, 17 aa, Artificial Sequence
  Synthetically generated peptide
  VARIANT (1)..(17): Xaa = Any Amino Acid
CCXELCCXNXXPACTGC

SEQ ID NO: 4423 - protein, 17 aa, Artificial Sequence
  Synthetically generated peptide
  VARIANT (1)..(17): Xaa = Any Amino Acid
CCXELCCXNXPXACTGC

SEQ ID NO: 4424 - protein, 17 aa, Artificial Sequence
  Synthetically generated peptide
  VARIANT (1)..(17): Xaa = Any Amino Acid
CCXELCCXNXPAXCTGC

SEQ ID NO: 4425 - protein, 17 aa, Artificial Sequence
  Synthetically generated peptide
  VARIANT (1)..(17): Xaa = Any Amino Acid
CCXELCCXNXPACXTGC

SEQ ID NO: 4426 - protein, 17 aa, Artificial Sequence
  Synthetically generated peptide
  VARIANT (1)..(17): Xaa = Any Amino Acid
CCXELCCXNXPACTXGC

SEQ ID NO: 4427 - protein, 17 aa, Artificial Sequence
  Synthetically generated peptide
  VARIANT (1)..(17): Xaa = Any Amino Acid
CCXELCCXNXPACTGXC

SEQ ID NO: 4428 - protein, 16 aa, Artificial Sequence
  Synthetically generated peptide
  VARIANT (1)..(16): Xaa = Any Amino Acid
CCXELCCXNPXACTGC

SEQ ID NO: 4429 - protein, 17 aa, Artificial Sequence
  Synthetically generated peptide
  VARIANT (1)..(17): Xaa = Any Amino Acid
CCXELCCXNPXXACTGC

SEQ ID NO: 4430 - protein, 17 aa, Artificial Sequence
  Synthetically generated peptide
  VARIANT (1)..(17): Xaa = Any Amino Acid
CCXELCCXNPXAXCTGC

SEQ ID NO: 4431 - protein, 17 aa, Artificial Sequence
  Synthetically generated peptide
  VARIANT (1)..(17): Xaa = Any Amino Acid
CCXELCCXNPXACXTGC

SEQ ID NO: 4432 - protein, 17 aa, Artificial Sequence
  Synthetically generated peptide
  VARIANT (1)..(17): Xaa = Any Amino Acid
CCXELCCXNPXACTXGC

SEQ ID NO: 4433 - protein, 17 aa, Artificial Sequence
  Synthetically generated peptide
  VARIANT (1)..(17): Xaa = Any Amino Acid
CCXELCCXNPXACTGXC

SEQ ID NO: 4434 - protein, 16 aa, Artificial Sequence
  Synthetically generated peptide
  VARIANT (1)..(16): Xaa = Any Amino Acid
CCXELCCXNPAXCTGC

SEQ ID NO: 4435 - protein, 17 aa, Artificial Sequence
  Synthetically generated peptide
  VARIANT (1)..(17): Xaa = Any Amino Acid
CCXELCCXNPAXXCTGC

SEQ ID NO: 4436 - protein, 17 aa, Artificial Sequence
  Synthetically generated peptide
  VARIANT (1)..(17): Xaa = Any Amino Acid
CCXELCCXNPAXCXTGC

SEQ ID NO: 4437 - protein, 17 aa, Artificial Sequence
  Synthetically generated peptide
  VARIANT (1)..(17): Xaa = Any Amino Acid
CCXELCCXNPAXCTXGC

SEQ ID NO: 4438 - protein, 17 aa, Artificial Sequence
  Synthetically generated peptide
  VARIANT (1)..(17): Xaa = Any Amino Acid
CCXELCCXNPAXCTGXC

SEQ ID NO: 4439 - protein, 16 aa, Artificial Sequence
  Synthetically generated peptide
  VARIANT (1)..(16): Xaa = Any Amino Acid
CCXELCCXNPACXTGC

SEQ ID NO: 4440 - protein, 17 aa, Artificial Sequence
  Synthetically generated peptide
  VARIANT (1)..(17): Xaa = Any Amino Acid
CCXELCCXNPACXXTGC

SEQ ID NO: 4441 - protein, 17 aa, Artificial Sequence
  Synthetically generated peptide
  VARIANT (1)..(17): Xaa = Any Amino Acid
CCXELCCXNPACXTXGC

SEQ ID NO: 4442 - protein, 17 aa, Artificial Sequence
  Synthetically generated peptide
  VARIANT (1)..(17): Xaa = Any Amino Acid
CCXELCCXNPACXTGXC

SEQ ID NO: 4443 - protein, 16 aa, Artificial Sequence
  Synthetically generated peptide
  VARIANT (1)..(16): Xaa = Any Amino Acid
CCXELCCXNPACTXGC

SEQ ID NO: 4444 - protein, 17 aa, Artificial Sequence
  Synthetically generated peptide
  VARIANT (1)..(17): Xaa = Any Amino Acid
CCXELCCXNPACTXXGC

SEQ ID NO: 4445 - protein, 17 aa, Artificial Sequence
  Synthetically generated peptide
  VARIANT (1)..(17): Xaa = Any Amino Acid
CCXELCCXNPACTXGXC

SEQ ID NO: 4446 - protein, 16 aa, Artificial Sequence
  Synthetically generated peptide
  VARIANT (1)..(16): Xaa = Any Amino Acid
CCXELCCXNPACTGXC

SEQ ID NO: 4447 - protein, 17 aa, Artificial Sequence
  Synthetically generated peptide
  VARIANT (1)..(17): Xaa = Any Amino Acid
CCXELCCXNPACTGXXC

SEQ ID NO: 4448 - protein, 15 aa, Artificial Sequence
  Synthetically generated peptide
  VARIANT (1)..(15): Xaa = Any Amino Acid
CCXELCCNXPACTGC

SEQ ID NO: 4449 - protein, 16 aa, Artificial Sequence
  Synthetically generated peptide
  VARIANT (1)..(16): Xaa = Any Amino Acid
CCXELCCNXXPACTGC

SEQ ID NO: 4450 - protein, 17 aa, Artificial Sequence
  Synthetically generated peptide
  VARIANT (1)..(17): Xaa = Any Amino Acid
CCXELCCNXXXPACTGC

SEQ ID NO: 4451 - protein, 17 aa, Artificial Sequence
  Synthetically generated peptide
  VARIANT (1)..(17): Xaa = Any Amino Acid
CCXELCCNXXPXACTGC

SEQ ID NO: 4452 - protein, 17 aa, Artificial Sequence
  Synthetically generated peptide
  VARIANT (1)..(17): Xaa = Any Amino Acid
CCXELCCNXXPAXCTGC

SEQ ID NO: 4453 - protein, 17 aa, Artificial Sequence
  Synthetically generated peptide
  VARIANT (1)..(17): Xaa = Any Amino Acid
CCXELCCNXXPACXTGC

SEQ ID NO: 4454 - protein, 17 aa, Artificial Sequence
  Synthetically generated peptide
  VARIANT (1)..(17): Xaa = Any Amino Acid
CCXELCCNXXPACTXGC

SEQ ID NO: 4455 - protein, 17 aa, Artificial Sequence
  Synthetically generated peptide
  VARIANT (1)..(17): Xaa = Any Amino Acid
CCXELCCNXXPACTGXC

SEQ ID NO: 4456 - protein, 16 aa, Artificial Sequence
  Synthetically generated peptide
  VARIANT (1)..(16): Xaa = Any Amino Acid
CCXELCCNXPXACTGC

SEQ ID NO: 4457 - protein, 17 aa, Artificial Sequence
  Synthetically generated peptide
  VARIANT (1)..(17): Xaa = Any Amino Acid
CCXELCCNXPXXACTGC

SEQ ID NO: 4458 - protein, 17 aa, Artificial Sequence
  Synthetically generated peptide
  VARIANT (1)..(17): Xaa = Any Amino Acid
CCXELCCNXPXAXCTGC

SEQ ID NO: 4459 - protein, 17 aa, Artificial Sequence
  Synthetically generated peptide
  VARIANT (1)..(17): Xaa = Any Amino Acid
CCXELCCNXPXACXTGC

SEQ ID NO: 4460 - protein, 17 aa, Artificial Sequence
  Synthetically generated peptide
  VARIANT (1)..(17): Xaa = Any Amino Acid
CCXELCCNXPXACTXGC

SEQ ID NO: 4461 - protein, 17 aa, Artificial Sequence
  Synthetically generated peptide
  VARIANT (1)..(17): Xaa = Any Amino Acid
CCXELCCNXPXACTGXC

SEQ ID NO: 4462 - protein, 16 aa, Artificial Sequence
  Synthetically generated peptide
  VARIANT (1)..(16): Xaa = Any Amino Acid
CCXELCCNXPAXCTGC

SEQ ID NO: 4463 - protein, 17 aa, Artificial Sequence
  Synthetically generated peptide
  VARIANT (1)..(17): Xaa = Any Amino Acid
CCXELCCNXPAXXCTGC

SEQ ID NO: 4464 - protein, 17 aa, Artificial Sequence
  Synthetically generated peptide
  VARIANT (1)..(17): Xaa = Any Amino Acid
CCXELCCNXPAXCXTGC

SEQ ID NO: 4465 - protein, 17 aa, Artificial Sequence
  Synthetically generated peptide
  VARIANT (1)..(17): Xaa = Any Amino Acid
CCXELCCNXPAXCTXGC

SEQ ID NO: 4466 - protein, 17 aa, Artificial Sequence
  Synthetically generated peptide
  VARIANT (1)..(17): Xaa = Any Amino Acid
CCXELCCNXPAXCTGXC

SEQ ID NO: 4467 - protein, 16 aa, Artificial Sequence
  Synthetically generated peptide
  VARIANT (1)..(16): Xaa = Any Amino Acid
CCXELCCNXPACXTGC

SEQ ID NO: 4468 - protein, 17 aa, Artificial Sequence
  Synthetically generated peptide
  VARIANT (1)..(17): Xaa = Any Amino Acid
CCXELCCNXPACXXTGC

SEQ ID NO: 4469 - protein, 17 aa, Artificial Sequence
  Synthetically generated peptide
  VARIANT (1)..(17): Xaa = Any Amino Acid
CCXELCCNXPACXTXGC

SEQ ID NO: 4470 - protein, 17 aa, Artificial Sequence
  Synthetically generated peptide
  VARIANT (1)..(17): Xaa = Any Amino Acid
CCXELCCNXPACXTGXC

SEQ ID NO: 4471 - protein, 16 aa, Artificial Sequence
  Synthetically generated peptide
  VARIANT (1)..(16): Xaa = Any Amino Acid
CCXELCCNXPACTXGC

SEQ ID NO: 4472 - protein, 17 aa, Artificial Sequence
  Synthetically generated peptide
  VARIANT (1)..(17): Xaa = Any Amino Acid
CCXELCCNXPACTXXGC

SEQ ID NO: 4473 - protein, 17 aa, Artificial Sequence
  Synthetically generated peptide
  VARIANT (1)..(17): Xaa = Any Amino Acid
CCXELCCNXPACTXGXC

SEQ ID NO: 4474 - protein, 16 aa, Artificial Sequence
  Synthetically generated peptide
  VARIANT (1)..(16): Xaa = Any Amino Acid
CCXELCCNXPACTGXC

SEQ ID NO: 4475 - protein, 17 aa, Artificial Sequence
  Synthetically generated peptide
  VARIANT (1)..(17): Xaa = Any Amino Acid
CCXELCCNXPACTGXXC

SEQ ID NO: 4476 - protein, 15 aa, Artificial Sequence
  Synthetically generated peptide
  VARIANT (1)..(15): Xaa = Any Amino Acid
CCXELCCNPXACTGC

SEQ ID NO: 4477 - protein, 16 aa, Artificial Sequence
  Synthetically generated peptide
  VARIANT (1)..(16): Xaa = Any Amino Acid
CCXELCCNPXXACTGC

SEQ ID NO: 4478 - protein, 17 aa, Artificial Sequence
  Synthetically generated peptide
  VARIANT (1)..(17): Xaa = Any Amino Acid
CCXELCCNPXXXACTGC

SEQ ID NO: 4479 - protein, 17 aa, Artificial Sequence
  Synthetically generated peptide
  VARIANT (1)..(17): Xaa = Any Amino Acid
CCXELCCNPXXAXCTGC

SEQ ID NO: 4480 - protein, 17 aa, Artificial Sequence
  Synthetically generated peptide
  VARIANT (1)..(17): Xaa = Any Amino Acid
CCXELCCNPXXACXTGC

SEQ ID NO: 4481 - protein, 17 aa, Artificial Sequence
  Synthetically generated peptide
  VARIANT (1)..(17): Xaa = Any Amino Acid
CCXELCCNPXXACTXGC

SEQ ID NO: 4482 - protein, 17 aa, Artificial Sequence
  Synthetically generated peptide
  VARIANT (1)..(17): Xaa = Any Amino Acid
CCXELCCNPXXACTGXC

SEQ ID NO: 4483 - protein, 16 aa, Artificial Sequence
  Synthetically generated peptide
  VARIANT (1)..(16): Xaa = Any Amino Acid
CCXELCCNPXAXCTGC

SEQ ID NO: 4484 - protein, 17 aa, Artificial Sequence
  Synthetically generated peptide
  VARIANT (1)..(17): Xaa = Any Amino Acid
CCXELCCNPXAXXCTGC

SEQ ID NO: 4485 - protein, 17 aa, Artificial Sequence
  Synthetically generated peptide
  VARIANT (1)..(17): Xaa = Any Amino Acid
CCXELCCNPXAXCXTGC

SEQ ID NO: 4486 - protein, 17 aa, Artificial Sequence
  Synthetically generated peptide
  VARIANT (1)..(17): Xaa = Any Amino Acid
CCXELCCNPXAXCTXGC

SEQ ID NO: 4487 - protein, 17 aa, Artificial Sequence
  Synthetically generated peptide
  VARIANT (1)..(17): Xaa = Any Amino Acid
CCXELCCNPXAXCTGXC

SEQ ID NO: 4488 - protein, 16 aa, Artificial Sequence
  Synthetically generated peptide
  VARIANT (1)..(16): Xaa = Any Amino Acid
CCXELCCNPXACXTGC

SEQ ID NO: 4489 - protein, 17 aa, Artificial Sequence
  Synthetically generated peptide
  VARIANT (1)..(17): Xaa = Any Amino Acid
CCXELCCNPXACXXTGC

SEQ ID NO: 4490 - protein, 17 aa, Artificial Sequence
  Synthetically generated peptide
  VARIANT (1)..(17): Xaa = Any Amino Acid
CCXELCCNPXACXTXGC

SEQ ID NO: 4491 - protein, 17 aa, Artificial Sequence
  Synthetically generated peptide
  VARIANT (1)..(17): Xaa = Any Amino Acid
CCXELCCNPXACXTGXC

SEQ ID NO: 4492 - protein, 16 aa, Artificial Sequence
  Synthetically generated peptide
  VARIANT (1)..(16): Xaa = Any Amino Acid
CCXELCCNPXACTXGC

SEQ ID NO: 4493 - protein, 17 aa, Artificial Sequence
  Synthetically generated peptide
  VARIANT (1)..(17): Xaa = Any Amino Acid
CCXELCCNPXACTXXGC

SEQ ID NO: 4494 - protein, 17 aa, Artificial Sequence
  Synthetically generated peptide
  VARIANT (1)..(17): Xaa = Any Amino Acid
CCXELCCNPXACTXGXC

SEQ ID NO: 4495 - protein, 16 aa, Artificial Sequence
  Synthetically generated peptide
  VARIANT (1)..(16): Xaa = Any Amino Acid
CCXELCCNPXACTGXC

SEQ ID NO: 4496 - protein, 17 aa, Artificial Sequence
  Synthetically generated peptide
  VARIANT (1)..(17): Xaa = Any Amino Acid
CCXELCCNPXACTGXXC

SEQ ID NO: 4497 - protein, 15 aa, Artificial Sequence
  Synthetically generated peptide
  VARIANT (1)..(15): Xaa = Any Amino Acid
CCXELCCNPAXCTGC

SEQ ID NO: 4498 - protein, 16 aa, Artificial Sequence
  Synthetically generated peptide
  VARIANT (1)..(16): Xaa = Any Amino Acid
CCXELCCNPAXXCTGC

SEQ ID NO: 4499 - protein, 17 aa, Artificial Sequence
  Synthetically generated peptide
  VARIANT (1)..(17): Xaa = Any Amino Acid
CCXELCCNPAXXXCTGC

SEQ ID NO: 4500 - protein, 17 aa, Artificial Sequence
  Synthetically generated peptide
  VARIANT (1)..(17): Xaa = Any Amino Acid
CCXELCCNPAXXCXTGC

SEQ ID NO: 4501 - protein, 17 aa, Artificial Sequence
  Synthetically generated peptide
  VARIANT (1)..(17): Xaa = Any Amino Acid
CCXELCCNPAXXCTXGC

SEQ ID NO: 4502 - protein, 17 aa, Artificial Sequence
  Synthetically generated peptide
  VARIANT (1)..(17): Xaa = Any Amino Acid
CCXELCCNPAXXCTGXC

SEQ ID NO: 4503 - protein, 16 aa, Artificial Sequence
  Synthetically generated peptide
  VARIANT (1)..(16): Xaa = Any Amino Acid
CCXELCCNPAXCXTGC

SEQ ID NO: 4504 - protein, 17 aa, Artificial Sequence
  Synthetically generated peptide
  VARIANT (1)..(17): Xaa = Any Amino Acid
CCXELCCNPAXCXXTGC

SEQ ID NO: 4505 - protein, 17 aa, Artificial Sequence
  Synthetically generated peptide
  VARIANT (1)..(17): Xaa = Any Amino Acid
CCXELCCNPAXCXTXGC

SEQ ID NO: 4506 - protein, 17 aa, Artificial Sequence
  Synthetically generated peptide
  VARIANT (1)..(17): Xaa = Any Amino Acid
CCXELCCNPAXCXTGXC

SEQ ID NO: 4507 - protein, 16 aa, Artificial Sequence
  Synthetically generated peptide
  VARIANT (1)..(16): Xaa = Any Amino Acid
CCXELCCNPAXCTXGC

SEQ ID NO: 4508 - protein, 17 aa, Artificial Sequence
  Synthetically generated peptide
  VARIANT (1)..(17): Xaa = Any Amino Acid
CCXELCCNPAXCTXXGC

SEQ ID NO: 4509 - protein, 17 aa, Artificial Sequence
  Synthetically generated peptide
  VARIANT (1)..(17): Xaa = Any Amino Acid
CCXELCCNPAXCTXGXC

SEQ ID NO: 4510 - protein, 16 aa, Artificial Sequence
  Synthetically generated peptide
  VARIANT (1)..(16): Xaa = Any Amino Acid
CCXELCCNPAXCTGXC

SEQ ID NO: 4511 - protein, 17 aa, Artificial Sequence
  Synthetically generated peptide
  VARIANT (1)..(17): Xaa = Any Amino Acid
CCXELCCNPAXCTGXXC

SEQ ID NO: 4512 - protein, 15 aa, Artificial Sequence
  Synthetically generated peptide
  VARIANT (1)..(15): Xaa = Any Amino Acid
CCXELCCNPACXTGC

SEQ ID NO: 4513 - protein, 16 aa, Artificial Sequence
  Synthetically generated peptide
  VARIANT (1)..(16): Xaa = Any Amino Acid
CCXELCCNPACXXTGC

SEQ ID NO: 4514 - protein, 17 aa, Artificial Sequence
  Synthetically generated peptide
  VARIANT (1)..(17): Xaa = Any Amino Acid
CCXELCCNPACXXXTGC

SEQ ID NO: 4515 - protein, 17 aa, Artificial Sequence
  Synthetically generated peptide
  VARIANT (1)..(17): Xaa = Any Amino Acid
CCXELCCNPACXXTXGC

SEQ ID NO: 4516 - protein, 17 aa, Artificial Sequence
  Synthetically generated peptide
  VARIANT (1)..(17): Xaa = Any Amino Acid
CCXELCCNPACXXTGXC

SEQ ID NO: 4517 - protein, 16 aa, Artificial Sequence
  Synthetically generated peptide
  VARIANT (1)..(16): Xaa = Any Amino Acid
CCXELCCNPACXTXGC

SEQ ID NO: 4518 - protein, 17 aa, Artificial Sequence
  Synthetically generated peptide
  VARIANT (1)..(17): Xaa = Any Amino Acid
CCXELCCNPACXTXXGC

SEQ ID NO: 4519 - protein, 17 aa, Artificial Sequence
  Synthetically generated peptide
  VARIANT (1)..(17): Xaa = Any Amino Acid
CCXELCCNPACXTXGXC

SEQ ID NO: 4520 - protein, 16 aa, Artificial Sequence
  Synthetically generated peptide
  VARIANT (1)..(16): Xaa = Any Amino Acid
CCXELCCNPACXTGXC

SEQ ID NO: 4521 - protein, 17 aa, Artificial Sequence
  Synthetically generated peptide
  VARIANT (1)..(17): Xaa = Any Amino Acid
CCXELCCNPACXTGXXC

SEQ ID NO: 4522 - protein, 15 aa, Artificial Sequence
  Synthetically generated peptide
  VARIANT (1)..(15): Xaa = Any Amino Acid
CCXELCCNPACTXGC

SEQ ID NO: 4523 - protein, 16 aa, Artificial Sequence
  Synthetically generated peptide
  VARIANT (1)..(16): Xaa = Any Amino Acid
CCXELCCNPACTXXGC

SEQ ID NO: 4524 - protein, 17 aa, Artificial Sequence
  Synthetically generated peptide
  VARIANT (1)..(17): Xaa = Any Amino Acid
CCXELCCNPACTXXXGC

SEQ ID NO: 4525 - protein, 17 aa, Artificial Sequence
  Synthetically generated peptide
  VARIANT (1)..(17): Xaa = Any Amino Acid
CCXELCCNPACTXXGXC

SEQ ID NO: 4526 - protein, 16 aa, Artificial Sequence
  Synthetically generated peptide
  VARIANT (1)..(16): Xaa = Any Amino Acid
CCXELCCNPACTXGXC

SEQ ID NO: 4527 - protein, 17 aa, Artificial Sequence
  Synthetically generated peptide
  VARIANT (1)..(17): Xaa = Any Amino Acid
CCXELCCNPACTXGXXC

SEQ ID NO: 4528 - protein, 15 aa, Artificial Sequence
  Synthetically generated peptide
  VARIANT (1)..(15): Xaa = Any Amino Acid
CCXELCCNPACTGXC

SEQ ID NO: 4529 - protein, 16 aa, Artificial Sequence
  Synthetically generated peptide
  VARIANT (1)..(16): Xaa = Any Amino Acid
CCXELCCNPACTGXXC

SEQ ID NO: 4530 - protein, 17 aa, Artificial Sequence
  Synthetically generated peptide
  VARIANT (1)..(17): Xaa = Any Amino Acid
CCXELCCNPACTGXXXC

SEQ ID NO: 4531 - protein, 14 aa, Artificial Sequence
  Synthetically generated peptide
  VARIANT (1)..(14): Xaa = Any Amino Acid
CCEXLCCNPACTGC

SEQ ID NO: 4532 - protein, 15 aa, Artificial Sequence
  Synthetically generated peptide
  VARIANT (1)..(15): Xaa = Any Amino Acid
CCEXXLCCNPACTGC

SEQ ID NO: 4533 - protein, 16 aa, Artificial Sequence
  Synthetically generated peptide
  VARIANT (1)..(16): Xaa = Any Amino Acid
CCEXXXLCCNPACTGC

SEQ ID NO: 4534 - protein, 17 aa, Artificial Sequence
  Synthetically generated peptide
  VARIANT (1)..(17): Xaa = Any Amino Acid
CCEXXXXLCCNPACTGC

SEQ ID NO: 4535 - protein, 17 aa, Artificial Sequence
  Synthetically generated peptide
  VARIANT (1)..(17): Xaa = Any Amino Acid
CCEXXXLXCCNPACTGC

SEQ ID NO: 4536 - protein, 17 aa, Artificial Sequence
  Synthetically generated peptide
  VARIANT (1)..(17): Xaa = Any Amino Acid
CCEXXXLCCXNPACTGC

SEQ ID NO: 4537 - protein, 17 aa, Artificial Sequence
  Synthetically generated peptide
  VARIANT (1)..(17): Xaa = Any Amino Acid
CCEXXXLCCNXPACTGC

SEQ ID NO: 4538 - protein, 17 aa, Artificial Sequence
  Synthetically generated peptide
  VARIANT (1)..(17): Xaa = Any Amino Acid
CCEXXXLCCNPXACTGC

SEQ ID NO: 4539 - protein, 17 aa, Artificial Sequence
  Synthetically generated peptide
  VARIANT (1)..(17): Xaa = Any Amino Acid
CCEXXXLCCNPAXCTGC

SEQ ID NO: 4540 - protein, 17 aa, Artificial Sequence
  Synthetically generated peptide
  VARIANT (1)..(17): Xaa = Any Amino Acid
CCEXXXLCCNPACXTGC

SEQ ID NO: 4541 - protein, 17 aa, Artificial Sequence
  Synthetically generated peptide
  VARIANT (1)..(17): Xaa = Any Amino Acid
CCEXXXLCCNPACTXGC

SEQ ID NO: 4542 - protein, 17 aa, Artificial Sequence
  Synthetically generated peptide
  VARIANT (1)..(17): Xaa = Any Amino Acid
CCEXXXLCCNPACTGXC

SEQ ID NO: 4543 - protein, 16 aa, Artificial Sequence
  Synthetically generated peptide
  VARIANT (1)..(16): Xaa = Any Amino Acid
CCEXXLXCCNPACTGC

SEQ ID NO: 4544 - protein, 17 aa, Artificial Sequence
  Synthetically generated peptide
  VARIANT (1)..(17): Xaa = Any Amino Acid
CCEXXLXXCCNPACTGC

SEQ ID NO: 4545 - protein, 17 aa, Artificial Sequence
  Synthetically generated peptide
  VARIANT (1)..(17): Xaa = Any Amino Acid
CCEXXLXCCXNPACTGC

SEQ ID NO: 4546 - protein, 17 aa, Artificial Sequence
  Synthetically generated peptide
  VARIANT (1)..(17): Xaa = Any Amino Acid
CCEXXLXCCNXPACTGC

SEQ ID NO: 4547 - protein, 17 aa, Artificial Sequence
  Synthetically generated peptide
  VARIANT (1)..(17): Xaa = Any Amino Acid
CCEXXLXCCNPXACTGC

SEQ ID NO: 4548 - protein, 17 aa, Artificial Sequence
  Synthetically generated peptide
  VARIANT (1)..(17): Xaa = Any Amino Acid
CCEXXLXCCNPAXCTGC

SEQ ID NO: 4549 - protein, 17 aa, Artificial Sequence
  Synthetically generated peptide
  VARIANT (1)..(17): Xaa = Any Amino Acid
CCEXXLXCCNPACXTGC

SEQ ID NO: 4550 - protein, 17 aa, Artificial Sequence
  Synthetically generated peptide
  VARIANT (1)..(17): Xaa = Any Amino Acid
CCEXXLXCCNPACTXGC

SEQ ID NO: 4551 - protein, 17 aa, Artificial Sequence
  Synthetically generated peptide
  VARIANT (1)..(17): Xaa = Any Amino Acid
CCEXXLXCCNPACTGXC

SEQ ID NO: 4552 - protein, 16 aa, Artificial Sequence
  Synthetically generated peptide
  VARIANT (1)..(16): Xaa = Any Amino Acid
CCEXXLCCXNPACTGC

SEQ ID NO: 4553 - protein, 17 aa, Artificial Sequence
  Synthetically generated peptide
  VARIANT (1)..(17): Xaa = Any Amino Acid
CCEXXLCCXXNPACTGC

SEQ ID NO: 4554 - protein, 17 aa, Artificial Sequence
  Synthetically generated peptide
  VARIANT (1)..(17): Xaa = Any Amino Acid
CCEXXLCCXNXPACTGC

SEQ ID NO: 4555 - protein, 17 aa, Artificial Sequence
  Synthetically generated peptide
  VARIANT (1)..(17): Xaa = Any Amino Acid
CCEXXLCCXNPXACTGC

SEQ ID NO: 4556 - protein, 17 aa, Artificial Sequence
  Synthetically generated peptide
  VARIANT (1)..(17): Xaa = Any Amino Acid
CCEXXLCCXNPAXCTGC

SEQ ID NO: 4557 - protein, 17 aa, Artificial Sequence
  Synthetically generated peptide
  VARIANT (1)..(17): Xaa = Any Amino Acid
CCEXXLCCXNPACXTGC

SEQ ID NO: 4558 - protein, 17 aa, Artificial Sequence
  Synthetically generated peptide
  VARIANT (1)..(17): Xaa = Any Amino Acid
CCEXXLCCXNPACTXGC

SEQ ID NO: 4559 - protein, 17 aa, Artificial Sequence
  Synthetically generated peptide
  VARIANT (1)..(17): Xaa = Any Amino Acid
CCEXXLCCXNPACTGXC

SEQ ID NO: 4560 - protein, 16 aa, Artificial Sequence
  Synthetically generated peptide
  VARIANT (1)..(16): Xaa = Any Amino Acid
CCEXXLCCNXPACTGC

SEQ ID NO: 4561 - protein, 17 aa, Artificial Sequence
  Synthetically generated peptide
  VARIANT (1)..(17): Xaa = Any Amino Acid
CCEXXLCCNXXPACTGC

SEQ ID NO: 4562 - protein, 17 aa, Artificial Sequence
  Synthetically generated peptide
  VARIANT (1)..(17): Xaa = Any Amino Acid
CCEXXLCCNXPXACTGC

SEQ ID NO: 4563 - protein, 17 aa, Artificial Sequence
  Synthetically generated peptide
  VARIANT (1)..(17): Xaa = Any Amino Acid
CCEXXLCCNXPAXCTGC

SEQ ID NO: 4564 - protein, 17 aa, Artificial Sequence
  Synthetically generated peptide
  VARIANT (1)..(17): Xaa = Any Amino Acid
CCEXXLCCNXPACXTGC

SEQ ID NO: 4565 - protein, 17 aa, Artificial Sequence
  Synthetically generated peptide
  VARIANT (1)..(17): Xaa = Any Amino Acid
CCEXXLCCNXPACTXGC

SEQ ID NO: 4566 - protein, 17 aa, Artificial Sequence
  Synthetically generated peptide
  VARIANT (1)..(17): Xaa = Any Amino Acid
CCEXXLCCNXPACTGXC

SEQ ID NO: 4567 - protein, 16 aa, Artificial Sequence
  Synthetically generated peptide
  VARIANT (1)..(16): Xaa = Any Amino Acid
CCEXXLCCNPXACTGC

SEQ ID NO: 4568 - protein, 17 aa, Artificial Sequence
  Synthetically generated peptide
  VARIANT (1)..(17): Xaa = Any Amino Acid
CCEXXLCCNPXXACTGC

SEQ ID NO: 4569 - protein, 17 aa, Artificial Sequence
  Synthetically generated peptide
  VARIANT (1)..(17): Xaa = Any Amino Acid
CCEXXLCCNPXAXCTGC

SEQ ID NO: 4570 - protein, 17 aa, Artificial Sequence
  Synthetically generated peptide
  VARIANT (1)..(17): Xaa = Any Amino Acid
CCEXXLCCNPXACXTGC

SEQ ID NO: 4571 - protein, 17 aa, Artificial Sequence
  Synthetically generated peptide
  VARIANT (1)..(17): Xaa = Any Amino Acid
CCEXXLCCNPXACTXGC

SEQ ID NO: 4572 - protein, 17 aa, Artificial Sequence
  Synthetically generated peptide
  VARIANT (1)..(17): Xaa = Any Amino Acid
CCEXXLCCNPXACTGXC

SEQ ID NO: 4573 - protein, 16 aa, Artificial Sequence
  Synthetically generated peptide
  VARIANT (1)..(16): Xaa = Any Amino Acid
CCEXXLCCNPAXCTGC

SEQ ID NO: 4574 - protein, 17 aa, Artificial Sequence
  Synthetically generated peptide
  VARIANT (1)..(17): Xaa = Any Amino Acid
CCEXXLCCNPAXXCTGC

SEQ ID NO: 4575 - protein, 17 aa, Artificial Sequence
  Synthetically generated peptide
  VARIANT (1)..(17): Xaa = Any Amino Acid
CCEXXLCCNPAXCXTGC

SEQ ID NO: 4576 - protein, 17 aa, Artificial Sequence
  Synthetically generated peptide
  VARIANT (1)..(17): Xaa = Any Amino Acid
CCEXXLCCNPAXCTXGC

SEQ ID NO: 4577 - protein, 17 aa, Artificial Sequence
  Synthetically generated peptide
  VARIANT (1)..(17): Xaa = Any Amino Acid
CCEXXLCCNPAXCTGXC

SEQ ID NO: 4578 - protein, 16 aa, Artificial Sequence
  Synthetically generated peptide
  VARIANT (1)..(16): Xaa = Any Amino Acid
CCEXXLCCNPACXTGC

SEQ ID NO: 4579 - protein, 17 aa, Artificial Sequence
  Synthetically generated peptide
  VARIANT (1)..(17): Xaa = Any Amino Acid
CCEXXLCCNPACXXTGC

SEQ ID NO: 4580 - protein, 17 aa, Artificial Sequence
  Synthetically generated peptide
  VARIANT (1)..(17): Xaa = Any Amino Acid
CCEXXLCCNPACXTXGC

SEQ ID NO: 4581 - protein, 17 aa, Artificial Sequence
  Synthetically generated peptide
  VARIANT (1)..(17): Xaa = Any Amino Acid
CCEXXLCCNPACXTGXC

SEQ ID NO: 4582 - protein, 16 aa, Artificial Sequence
  Synthetically generated peptide
  VARIANT (1)..(16): Xaa = Any Amino Acid
CCEXXLCCNPACTXGC

SEQ ID NO: 4583 - protein, 17 aa, Artificial Sequence
  Synthetically generated peptide
  VARIANT (1)..(17): Xaa = Any Amino Acid
CCEXXLCCNPACTXXGC

SEQ ID NO: 4584 - protein, 17 aa, Artificial Sequence
  Synthetically generated peptide
  VARIANT (1)..(17): Xaa = Any Amino Acid
CCEXXLCCNPACTXGXC

SEQ ID NO: 4585 - protein, 16 aa, Artificial Sequence
  Synthetically generated peptide
  VARIANT (1)..(16): Xaa = Any Amino Acid
CCEXXLCCNPACTGXC

SEQ ID NO: 4586 - protein, 17 aa, Artificial Sequence
  Synthetically generated peptide
  VARIANT (1)..(17): Xaa = Any Amino Acid
CCEXXLCCNPACTGXXC

SEQ ID NO: 4587 - protein, 15 aa, Artificial Sequence
  Synthetically generated peptide
  VARIANT (1)..(15): Xaa = Any Amino Acid
CCEXLXCCNPACTGC

SEQ ID NO: 4588 - protein, 16 aa, Artificial Sequence
  Synthetically generated peptide
  VARIANT (1)..(16): Xaa = Any Amino Acid
CCEXLXXCCNPACTGC

SEQ ID NO: 4589 - protein, 17 aa, Artificial Sequence
  Synthetically generated peptide
  VARIANT (1)..(17): Xaa = Any Amino Acid
CCEXLXXXCCNPACTGC

SEQ ID NO: 4590 - protein, 17 aa, Artificial Sequence
  Synthetically generated peptide
  VARIANT (1)..(17): Xaa = Any Amino Acid
CCEXLXXCCXNPACTGC

SEQ ID NO: 4591 - protein, 17 aa, Artificial Sequence
  Synthetically generated peptide
  VARIANT (1)..(17): Xaa = Any Amino Acid
CCEXLXXCCNXPACTGC

SEQ ID NO: 4592 - protein, 17 aa, Artificial Sequence
  Synthetically generated peptide
  VARIANT (1)..(17): Xaa = Any Amino Acid
CCEXLXXCCNPXACTGC

SEQ ID NO: 4593 - protein, 17 aa, Artificial Sequence
  Synthetically generated peptide
  VARIANT (1)..(17): Xaa = Any Amino Acid
CCEXLXXCCNPAXCTGC

SEQ ID NO: 4594 - protein, 17 aa, Artificial Sequence
  Synthetically generated peptide
  VARIANT (1)..(17): Xaa = Any Amino Acid
CCEXLXXCCNPACXTGC

SEQ ID NO: 4595 - protein, 17 aa, Artificial Sequence
  Synthetically generated peptide
  VARIANT (1)..(17): Xaa = Any Amino Acid
CCEXLXXCCNPACTXGC

SEQ ID NO: 4596 - protein, 17 aa, Artificial Sequence
  Synthetically generated peptide
  VARIANT (1)..(17): Xaa = Any Amino Acid
CCEXLXXCCNPACTGXC

SEQ ID NO: 4597 - protein, 16 aa, Artificial Sequence
  Synthetically generated peptide
  VARIANT (1)..(16): Xaa = Any Amino Acid
CCEXLXCCXNPACTGC

SEQ ID NO: 4598 - protein, 17 aa, Artificial Sequence
  Synthetically generated peptide
  VARIANT (1)..(17): Xaa = Any Amino Acid
CCEXLXCCXXNPACTGC

SEQ ID NO: 4599 - protein, 17 aa, Artificial Sequence
  Synthetically generated peptide
  VARIANT (1)..(17): Xaa = Any Amino Acid
CCEXLXCCXNXPACTGC

SEQ ID NO: 4600 - protein, 17 aa, Artificial Sequence
  Synthetically generated peptide
  VARIANT (1)..(17): Xaa = Any Amino Acid
CCEXLXCCXNPXACTGC

SEQ ID NO: 4601 - protein, 17 aa, Artificial Sequence
  Synthetically generated peptide
  VARIANT (1)..(17): Xaa = Any Amino Acid
CCEXLXCCXNPAXCTGC

SEQ ID NO: 4602 - protein, 17 aa, Artificial Sequence
  Synthetically generated peptide
  VARIANT (1)..(17): Xaa = Any Amino Acid
CCEXLXCCXNPACXTGC

SEQ ID NO: 4603 - protein, 17 aa, Artificial Sequence
  Synthetically generated peptide
  VARIANT (1)..(17): Xaa = Any Amino Acid
CCEXLXCCXNPACTXGC

SEQ ID NO: 4604 - protein, 17 aa, Artificial Sequence
  Synthetically generated peptide
  VARIANT (1)..(17): Xaa = Any Amino Acid
CCEXLXCCXNPACTGXC

SEQ ID NO: 4605 - protein, 16 aa, Artificial Sequence
  Synthetically generated peptide
  VARIANT (1)..(16): Xaa = Any Amino Acid
CCEXLXCCNXPACTGC

SEQ ID NO: 4606 - protein, 17 aa, Artificial Sequence
  Synthetically generated peptide
  VARIANT (1)..(17): Xaa = Any Amino Acid
CCEXLXCCNXXPACTGC

SEQ ID NO: 4607 - protein, 17 aa, Artificial Sequence
  Synthetically generated peptide
  VARIANT (1)..(17): Xaa = Any Amino Acid
CCEXLXCCNXPXACTGC

SEQ ID NO: 4608 - protein, 17 aa, Artificial Sequence
  Synthetically generated peptide
  VARIANT (1)..(17): Xaa = Any Amino Acid
CCEXLXCCNXPAXCTGC

SEQ ID NO: 4609 - protein, 17 aa, Artificial Sequence
  Synthetically generated peptide
  VARIANT (1)..(17): Xaa = Any Amino Acid
CCEXLXCCNXPACXTGC

SEQ ID NO: 4610 - protein, 17 aa, Artificial Sequence
  Synthetically generated peptide
  VARIANT (1)..(17): Xaa = Any Amino Acid
CCEXLXCCNXPACTXGC

SEQ ID NO: 4611 - protein, 17 aa, Artificial Sequence
  Synthetically generated peptide
  VARIANT (1)..(17): Xaa = Any Amino Acid
CCEXLXCCNXPACTGXC

SEQ ID NO: 4612 - protein, 16 aa, Artificial Sequence
  Synthetically generated peptide
  VARIANT (1)..(16): Xaa = Any Amino Acid
CCEXLXCCNPXACTGC

SEQ ID NO: 4613 - protein, 17 aa, Artificial Sequence
  Synthetically generated peptide
  VARIANT (1)..(17): Xaa = Any Amino Acid
CCEXLXCCNPXXACTGC

SEQ ID NO: 4614 - protein, 17 aa, Artificial Sequence
  Synthetically generated peptide
  VARIANT (1)..(17): Xaa = Any Amino Acid
CCEXLXCCNPXAXCTGC

SEQ ID NO: 4615 - protein, 17 aa, Artificial Sequence
  Synthetically generated peptide
  VARIANT (1)..(17): Xaa = Any Amino Acid
CCEXLXCCNPXACXTGC

SEQ ID NO: 4616 - protein, 17 aa, Artificial Sequence
  Synthetically generated peptide
  VARIANT (1)..(17): Xaa = Any Amino Acid
CCEXLXCCNPXACTXGC

SEQ ID NO: 4617 - protein, 17 aa, Artificial Sequence
  Synthetically generated peptide
  VARIANT (1)..(17): Xaa = Any Amino Acid
CCEXLXCCNPXACTGXC

SEQ ID NO: 4618 - protein, 16 aa, Artificial Sequence
  Synthetically generated peptide
  VARIANT (1)..(16): Xaa = Any Amino Acid
CCEXLXCCNPAXCTGC

SEQ ID NO: 4619 - protein, 17 aa, Artificial Sequence
  Synthetically generated peptide
  VARIANT (1)..(17): Xaa = Any Amino Acid
CCEXLXCCNPAXXCTGC

SEQ ID NO: 4620 - protein, 17 aa, Artificial Sequence
  Synthetically generated peptide
  VARIANT (1)..(17): Xaa = Any Amino Acid
CCEXLXCCNPAXCXTGC

SEQ ID NO: 4621 - protein, 17 aa, Artificial Sequence
  Synthetically generated peptide
  VARIANT (1)..(17): Xaa = Any Amino Acid
CCEXLXCCNPAXCTXGC

SEQ ID NO: 4622 - protein, 17 aa, Artificial Sequence
  Synthetically generated peptide
  VARIANT (1)..(17): Xaa = Any Amino Acid
CCEXLXCCNPAXCTGXC

SEQ ID NO: 4623 - protein, 16 aa, Artificial Sequence
  Synthetically generated peptide
  VARIANT (1)..(16): Xaa = Any Amino Acid
CCEXLXCCNPACXTGC

SEQ ID NO: 4624 - protein, 17 aa, Artificial Sequence
  Synthetically generated peptide
  VARIANT (1)..(17): Xaa = Any Amino Acid
CCEXLXCCNPACXXTGC

SEQ ID NO: 4625 - protein, 17 aa, Artificial Sequence
  Synthetically generated peptide
  VARIANT (1)..(17): Xaa = Any Amino Acid
CCEXLXCCNPACXTXGC

SEQ ID NO: 4626 - protein, 17 aa, Artificial Sequence
  Synthetically generated peptide
  VARIANT (1)..(17): Xaa = Any Amino Acid
CCEXLXCCNPACXTGXC

SEQ ID NO: 4627 - protein, 16 aa, Artificial Sequence
  Synthetically generated peptide
  VARIANT (1)..(16): Xaa = Any Amino Acid
CCEXLXCCNPACTXGC

SEQ ID NO: 4628 - protein, 17 aa, Artificial Sequence
  Synthetically generated peptide
  VARIANT (1)..(17): Xaa = Any Amino Acid
CCEXLXCCNPACTXXGC

SEQ ID NO: 4629 - protein, 17 aa, Artificial Sequence
  Synthetically generated peptide
  VARIANT (1)..(17): Xaa = Any Amino Acid
CCEXLXCCNPACTXGXC

SEQ ID NO: 4630 - protein, 16 aa, Artificial Sequence
  Synthetically generated peptide
  VARIANT (1)..(16): Xaa = Any Amino Acid
CCEXLXCCNPACTGXC

SEQ ID NO: 4631 - protein, 17 aa, Artificial Sequence
  Synthetically generated peptide
  VARIANT (1)..(17): Xaa = Any Amino Acid
CCEXLXCCNPACTGXXC

SEQ ID NO: 4632 - protein, 15 aa, Artificial Sequence
  Synthetically generated peptide
  VARIANT (1)..(15): Xaa = Any Amino Acid
CCEXLCCXNPACTGC

SEQ ID NO: 4633 - protein, 16 aa, Artificial Sequence
  Synthetically generated peptide
  VARIANT (1)..(16): Xaa = Any Amino Acid
CCEXLCCXXNPACTGC

SEQ ID NO: 4634 - protein, 17 aa, Artificial Sequence
  Synthetically generated peptide
  VARIANT (1)..(17): Xaa = Any Amino Acid
CCEXLCCXXXNPACTGC

SEQ ID NO: 4635 - protein, 17 aa, Artificial Sequence
  Synthetically generated peptide
  VARIANT (1)..(17): Xaa = Any Amino Acid
CCEXLCCXXNXPACTGC

SEQ ID NO: 4636 - protein, 17 aa, Artificial Sequence
  Synthetically generated peptide
  VARIANT (1)..(17): Xaa = Any Amino Acid
CCEXLCCXXNPXACTGC

SEQ ID NO: 4637 - protein, 17 aa, Artificial Sequence
  Synthetically generated peptide
  VARIANT (1)..(17): Xaa = Any Amino Acid
CCEXLCCXXNPAXCTGC

SEQ ID NO: 4638 - protein, 17 aa, Artificial Sequence
  Synthetically generated peptide
  VARIANT (1)..(17): Xaa = Any Amino Acid
CCEXLCCXXNPACXTGC

SEQ ID NO: 4639 - protein, 17 aa, Artificial Sequence
  Synthetically generated peptide
  VARIANT (1)..(17): Xaa = Any Amino Acid
CCEXLCCXXNPACTXGC

SEQ ID NO: 4640 - protein, 17 aa, Artificial Sequence
  Synthetically generated peptide
  VARIANT (1)..(17): Xaa = Any Amino Acid
CCEXLCCXXNPACTGXC

SEQ ID NO: 4641 - protein, 16 aa, Artificial Sequence
  Synthetically generated peptide
  VARIANT (1)..(16): Xaa = Any Amino Acid
CCEXLCCXNXPACTGC

SEQ ID NO: 4642 - protein, 17 aa, Artificial Sequence
  Synthetically generated peptide
  VARIANT (1)..(17): Xaa = Any Amino Acid
CCEXLCCXNXXPACTGC

SEQ ID NO: 4643 - protein, 17 aa, Artificial Sequence
  Synthetically generated peptide
  VARIANT (1)..(17): Xaa = Any Amino Acid
CCEXLCCXNXPXACTGC

SEQ ID NO: 4644 - protein, 17 aa, Artificial Sequence
  Synthetically generated peptide
  VARIANT (1)..(17): Xaa = Any Amino Acid
CCEXLCCXNXPAXCTGC

SEQ ID NO: 4645 - protein, 17 aa, Artificial Sequence
  Synthetically generated peptide
  VARIANT (1)..(17): Xaa = Any Amino Acid
CCEXLCCXNXPACXTGC

SEQ ID NO: 4646 - protein, 17 aa, Artificial Sequence
  Synthetically generated peptide
  VARIANT (1)..(17): Xaa = Any Amino Acid
CCEXLCCXNXPACTXGC

SEQ ID NO: 4647 - protein, 17 aa, Artificial Sequence
  Synthetically generated peptide
  VARIANT (1)..(17): Xaa = Any Amino Acid
CCEXLCCXNXPACTGXC

SEQ ID NO: 4648 - protein, 16 aa, Artificial Sequence
  Synthetically generated peptide
  VARIANT (1)..(16): Xaa = Any Amino Acid
CCEXLCCXNPXACTGC

SEQ ID NO: 4649 - protein, 17 aa, Artificial Sequence
  Synthetically generated peptide
  VARIANT (1)..(17): Xaa = Any Amino Acid
CCEXLCCXNPXXACTGC

SEQ ID NO: 4650 - protein, 17 aa, Artificial Sequence
  Synthetically generated peptide
  VARIANT (1)..(17): Xaa = Any Amino Acid
CCEXLCCXNPXAXCTGC

SEQ ID NO: 4651 - protein, 17 aa, Artificial Sequence
  Synthetically generated peptide
  VARIANT (1)..(17): Xaa = Any Amino Acid
CCEXLCCXNPXACXTGC

SEQ ID NO: 4652 - protein, 17 aa, Artificial Sequence
  Synthetically generated peptide
  VARIANT (1)..(17): Xaa = Any Amino Acid
CCEXLCCXNPXACTXGC

SEQ ID NO: 4653 - protein, 17 aa, Artificial Sequence
  Synthetically generated peptide
  VARIANT (1)..(17): Xaa = Any Amino Acid
CCEXLCCXNPXACTGXC

SEQ ID NO: 4654 - protein, 16 aa, Artificial Sequence
  Synthetically generated peptide
  VARIANT (1)..(16): Xaa = Any Amino Acid
CCEXLCCXNPAXCTGC

SEQ ID NO: 4655 - protein, 17 aa, Artificial Sequence
  Synthetically generated peptide
  VARIANT (1)..(17): Xaa = Any Amino Acid
CCEXLCCXNPAXXCTGC

SEQ ID NO: 4656 - protein, 17 aa, Artificial Sequence
  Synthetically generated peptide
  VARIANT (1)..(17): Xaa = Any Amino Acid
CCEXLCCXNPAXCXTGC

SEQ ID NO: 4657 - protein, 17 aa, Artificial Sequence
  Synthetically generated peptide
  VARIANT (1)..(17): Xaa = Any Amino Acid
CCEXLCCXNPAXCTXGC

SEQ ID NO: 4658 - protein, 17 aa, Artificial Sequence
  Synthetically generated peptide
  VARIANT (1)..(17): Xaa = Any Amino Acid
CCEXLCCXNPAXCTGXC

SEQ ID NO: 4659 - protein, 16 aa, Artificial Sequence
  Synthetically generated peptide
  VARIANT (1)..(16): Xaa = Any Amino Acid
CCEXLCCXNPACXTGC

SEQ ID NO: 4660 - protein, 17 aa, Artificial Sequence
  Synthetically generated peptide
  VARIANT (1)..(17): Xaa = Any Amino Acid
CCEXLCCXNPACXXTGC

SEQ ID NO: 4661 - protein, 17 aa, Artificial Sequence
  Synthetically generated peptide
  VARIANT (1)..(17): Xaa = Any Amino Acid
CCEXLCCXNPACXTXGC

SEQ ID NO: 4662 - protein, 17 aa, Artificial Sequence
  Synthetically generated peptide
  VARIANT (1)..(17): Xaa = Any Amino Acid
CCEXLCCXNPACXTGXC

SEQ ID NO: 4663 - protein, 16 aa, Artificial Sequence
  Synthetically generated peptide
  VARIANT (1)..(16): Xaa = Any Amino Acid
CCEXLCCXNPACTXGC

SEQ ID NO: 4664 - protein, 17 aa, Artificial Sequence
  Synthetically generated peptide
  VARIANT (1)..(17): Xaa = Any Amino Acid
CCEXLCCXNPACTXXGC

SEQ ID NO: 4665 - protein, 17 aa, Artificial Sequence
  Synthetically generated peptide
  VARIANT (1)..(17): Xaa = Any Amino Acid
CCEXLCCXNPACTXGXC

SEQ ID NO: 4666 - protein, 16 aa, Artificial Sequence
  Synthetically generated peptide
  VARIANT (1)..(16): Xaa = Any Amino Acid
CCEXLCCXNPACTGXC

SEQ ID NO: 4667 - protein, 17 aa, Artificial Sequence
  Synthetically generated peptide
  VARIANT (1)..(17): Xaa = Any Amino Acid
CCEXLCCXNPACTGXXC

SEQ ID NO: 4668 - protein, 15 aa, Artificial Sequence
  Synthetically generated peptide
  VARIANT (1)..(15): Xaa = Any Amino Acid
CCEXLCCNXPACTGC

SEQ ID NO: 4669 - protein, 16 aa, Artificial Sequence
  Synthetically generated peptide
  VARIANT (1)..(16): Xaa = Any Amino Acid
CCEXLCCNXXPACTGC

SEQ ID NO: 4670 - protein, 17 aa, Artificial Sequence
  Synthetically generated peptide
  VARIANT (1)..(17): Xaa = Any Amino Acid
CCEXLCCNXXXPACTGC

SEQ ID NO: 4671 - protein, 17 aa, Artificial Sequence
  Synthetically generated peptide
  VARIANT (1)..(17): Xaa = Any Amino Acid
CCEXLCCNXXPXACTGC

SEQ ID NO: 4672 - protein, 17 aa, Artificial Sequence
  Synthetically generated peptide
  VARIANT (1)..(17): Xaa = Any Amino Acid
CCEXLCCNXXPAXCTGC

SEQ ID NO: 4673 - protein, 17 aa, Artificial Sequence
  Synthetically generated peptide
  VARIANT (1)..(17): Xaa = Any Amino Acid
CCEXLCCNXXPACXTGC

SEQ ID NO: 4674 - protein, 17 aa, Artificial Sequence
  Synthetically generated peptide
  VARIANT (1)..(17): Xaa = Any Amino Acid
CCEXLCCNXXPACTXGC

SEQ ID NO: 4675 - protein, 17 aa, Artificial Sequence
  Synthetically generated peptide
  VARIANT (1)..(17): Xaa = Any Amino Acid
CCEXLCCNXXPACTGXC

SEQ ID NO: 4676 - protein, 16 aa, Artificial Sequence
  Synthetically generated peptide
  VARIANT (1)..(16): Xaa = Any Amino Acid
CCEXLCCNXPXACTGC

SEQ ID NO: 4677 - protein, 17 aa, Artificial Sequence
  Synthetically generated peptide
  VARIANT (1)..(17): Xaa = Any Amino Acid
CCEXLCCNXPXXACTGC

SEQ ID NO: 4678 - protein, 17 aa, Artificial Sequence
  Synthetically generated peptide
  VARIANT (1)..(17): Xaa = Any Amino Acid
CCEXLCCNXPXAXCTGC

SEQ ID NO: 4679 - protein, 17 aa, Artificial Sequence
  Synthetically generated peptide
  VARIANT (1)..(17): Xaa = Any Amino Acid
CCEXLCCNXPXACXTGC

SEQ ID NO: 4680 - protein, 17 aa, Artificial Sequence
  Synthetically generated peptide
  VARIANT (1)..(17): Xaa = Any Amino Acid
CCEXLCCNXPXACTXGC

SEQ ID NO: 4681 - protein, 17 aa, Artificial Sequence
  Synthetically generated peptide
  VARIANT (1)..(17): Xaa = Any Amino Acid
CCEXLCCNXPXACTGXC

SEQ ID NO: 4682 - protein, 16 aa, Artificial Sequence
  Synthetically generated peptide
  VARIANT (1)..(16): Xaa = Any Amino Acid
CCEXLCCNXPAXCTGC

SEQ ID NO: 4683 - protein, 17 aa, Artificial Sequence
  Synthetically generated peptide
  VARIANT (1)..(17): Xaa = Any Amino Acid
CCEXLCCNXPAXXCTGC

SEQ ID NO: 4684 - protein, 17 aa, Artificial Sequence
  Synthetically generated peptide
  VARIANT (1)..(17): Xaa = Any Amino Acid
CCEXLCCNXPAXCXTGC

SEQ ID NO: 4685 - protein, 17 aa, Artificial Sequence
  Synthetically generated peptide
  VARIANT (1)..(17): Xaa = Any Amino Acid
CCEXLCCNXPAXCTXGC

SEQ ID NO: 4686 - protein, 17 aa, Artificial Sequence
  Synthetically generated peptide
  VARIANT (1)..(17): Xaa = Any Amino Acid
CCEXLCCNXPAXCTGXC

SEQ ID NO: 4687 - protein, 16 aa, Artificial Sequence
  Synthetically generated peptide
  VARIANT (1)..(16): Xaa = Any Amino Acid
CCEXLCCNXPACXTGC

SEQ ID NO: 4688 - protein, 17 aa, Artificial Sequence
  Synthetically generated peptide
  VARIANT (1)..(17): Xaa = Any Amino Acid
CCEXLCCNXPACXXTGC

SEQ ID NO: 4689 - protein, 17 aa, Artificial Sequence
  Synthetically generated peptide
  VARIANT (1)..(17): Xaa = Any Amino Acid
CCEXLCCNXPACXTXGC

SEQ ID NO: 4690 - protein, 17 aa, Artificial Sequence
  Synthetically generated peptide
  VARIANT (1)..(17): Xaa = Any Amino Acid
CCEXLCCNXPACXTGXC

SEQ ID NO: 4691 - protein, 16 aa, Artificial Sequence
  Synthetically generated peptide
  VARIANT (1)..(16): Xaa = Any Amino Acid
CCEXLCCNXPACTXGC

SEQ ID NO: 4692 - protein, 17 aa, Artificial Sequence
  Synthetically generated peptide
  VARIANT (1)..(17): Xaa = Any Amino Acid
CCEXLCCNXPACTXXGC

SEQ ID NO: 4693 - protein, 17 aa, Artificial Sequence
  Synthetically generated peptide
  VARIANT (1)..(17): Xaa = Any Amino Acid
CCEXLCCNXPACTXGXC

SEQ ID NO: 4694 - protein, 16 aa, Artificial Sequence
  Synthetically generated peptide
  VARIANT (1)..(16): Xaa = Any Amino Acid
CCEXLCCNXPACTGXC

SEQ ID NO: 4695 - protein, 17 aa, Artificial Sequence
  Synthetically generated peptide
  VARIANT (1)..(17): Xaa = Any Amino Acid
CCEXLCCNXPACTGXXC

SEQ ID NO: 4696 - protein, 15 aa, Artificial Sequence
  Synthetically generated peptide
  VARIANT (1)..(15): Xaa = Any Amino Acid
CCEXLCCNPXACTGC

SEQ ID NO: 4697 - protein, 16 aa, Artificial Sequence
  Synthetically generated peptide
  VARIANT (1)..(16): Xaa = Any Amino Acid
CCEXLCCNPXXACTGC

SEQ ID NO: 4698 - protein, 17 aa, Artificial Sequence
  Synthetically generated peptide
  VARIANT (1)..(17): Xaa = Any Amino Acid
CCEXLCCNPXXXACTGC

SEQ ID NO: 4699 - protein, 17 aa, Artificial Sequence
  Synthetically generated peptide
  VARIANT (1)..(17): Xaa = Any Amino Acid
CCEXLCCNPXXAXCTGC

SEQ ID NO: 4700 - protein, 17 aa, Artificial Sequence
  Synthetically generated peptide
  VARIANT (1)..(17): Xaa = Any Amino Acid
CCEXLCCNPXXACXTGC

SEQ ID NO: 4701 - protein, 17 aa, Artificial Sequence
  Synthetically generated peptide
  VARIANT (1)..(17): Xaa = Any Amino Acid
CCEXLCCNPXXACTXGC

SEQ ID NO: 4702 - protein, 17 aa, Artificial Sequence
  Synthetically generated peptide
  VARIANT (1)..(17): Xaa = Any Amino Acid
CCEXLCCNPXXACTGXC

SEQ ID NO: 4703 - protein, 16 aa, Artificial Sequence
  Synthetically generated peptide
  VARIANT (1)..(16): Xaa = Any Amino Acid
CCEXLCCNPXAXCTGC

SEQ ID NO: 4704 - protein, 17 aa, Artificial Sequence
  Synthetically generated peptide
  VARIANT (1)..(17): Xaa = Any Amino Acid
CCEXLCCNPXAXXCTGC

SEQ ID NO: 4705 - protein, 17 aa, Artificial Sequence
  Synthetically generated peptide
  VARIANT (1)..(17): Xaa = Any Amino Acid
CCEXLCCNPXAXCXTGC

SEQ ID NO: 4706 - protein, 17 aa, Artificial Sequence
  Synthetically generated peptide
  VARIANT (1)..(17): Xaa = Any Amino Acid
CCEXLCCNPXAXCTXGC

SEQ ID NO: 4707 - protein, 17 aa, Artificial Sequence
  Synthetically generated peptide
  VARIANT (1)..(17): Xaa = Any Amino Acid
CCEXLCCNPXAXCTGXC

SEQ ID NO: 4708 - protein, 16 aa, Artificial Sequence
  Synthetically generated peptide
  VARIANT (1)..(16): Xaa = Any Amino Acid
CCEXLCCNPXACXTGC

SEQ ID NO: 4709 - protein, 17 aa, Artificial Sequence
  Synthetically generated peptide
  VARIANT (1)..(17): Xaa = Any Amino Acid
CCEXLCCNPXACXXTGC

SEQ ID NO: 4710 - protein, 17 aa, Artificial Sequence
  Synthetically generated peptide
  VARIANT (1)..(17): Xaa = Any Amino Acid
CCEXLCCNPXACXTXGC

SEQ ID NO: 4711 - protein, 17 aa, Artificial Sequence
  Synthetically generated peptide
  VARIANT (1)..(17): Xaa = Any Amino Acid
CCEXLCCNPXACXTGXC

SEQ ID NO: 4712 - protein, 16 aa, Artificial Sequence
  Synthetically generated peptide
  VARIANT (1)..(16): Xaa = Any Amino Acid
CCEXLCCNPXACTXGC

SEQ ID NO: 4713 - protein, 17 aa, Artificial Sequence
  Synthetically generated peptide
  VARIANT (1)..(17): Xaa = Any Amino Acid
CCEXLCCNPXACTXXGC

SEQ ID NO: 4714 - protein, 17 aa, Artificial Sequence
  Synthetically generated peptide
  VARIANT (1)..(17): Xaa = Any Amino Acid
CCEXLCCNPXACTXGXC

SEQ ID NO: 4715 - protein, 16 aa, Artificial Sequence
  Synthetically generated peptide
  VARIANT (1)..(16): Xaa = Any Amino Acid
CCEXLCCNPXACTGXC

SEQ ID NO: 4716 - protein, 17 aa, Artificial Sequence
  Synthetically generated peptide
  VARIANT (1)..(17): Xaa = Any Amino Acid
CCEXLCCNPXACTGXXC

SEQ ID NO: 4717 - protein, 15 aa, Artificial Sequence
  Synthetically generated peptide
  VARIANT (1)..(15): Xaa = Any Amino Acid
CCEXLCCNPAXCTGC

SEQ ID NO: 4718 - protein, 16 aa, Artificial Sequence
  Synthetically generated peptide
  VARIANT (1)..(16): Xaa = Any Amino Acid
CCEXLCCNPAXXCTGC

SEQ ID NO: 4719 - protein, 17 aa, Artificial Sequence
  Synthetically generated peptide
  VARIANT (1)..(17): Xaa = Any Amino Acid
CCEXLCCNPAXXXCTGC

SEQ ID NO: 4720 - protein, 17 aa, Artificial Sequence
  Synthetically generated peptide
  VARIANT (1)..(17): Xaa = Any Amino Acid
CCEXLCCNPAXXCXTGC

SEQ ID NO: 4721 - protein, 17 aa, Artificial Sequence
  Synthetically generated peptide
  VARIANT (1)..(17): Xaa = Any Amino Acid
CCEXLCCNPAXXCTXGC

SEQ ID NO: 4722 - protein, 17 aa, Artificial Sequence
  Synthetically generated peptide
  VARIANT (1)..(17): Xaa = Any Amino Acid
CCEXLCCNPAXXCTGXC

SEQ ID NO: 4723 - protein, 16 aa, Artificial Sequence
  Synthetically generated peptide
  VARIANT (1)..(16): Xaa = Any Amino Acid
CCEXLCCNPAXCXTGC

SEQ ID NO: 4724 - protein, 17 aa, Artificial Sequence
  Synthetically generated peptide
  VARIANT (1)..(17): Xaa = Any Amino Acid
CCEXLCCNPAXCXXTGC

SEQ ID NO: 4725 - protein, 17 aa, Artificial Sequence
  Synthetically generated peptide
  VARIANT (1)..(17): Xaa = Any Amino Acid
CCEXLCCNPAXCXTXGC

SEQ ID NO: 4726 - protein, 17 aa, Artificial Sequence
  Synthetically generated peptide
  VARIANT (1)..(17): Xaa = Any Amino Acid
CCEXLCCNPAXCXTGXC

SEQ ID NO: 4727 - protein, 16 aa, Artificial Sequence
  Synthetically generated peptide
  VARIANT (1)..(16): Xaa = Any Amino Acid
CCEXLCCNPAXCTXGC

SEQ ID NO: 4728 - protein, 17 aa, Artificial Sequence
  Synthetically generated peptide
  VARIANT (1)..(17): Xaa = Any Amino Acid
CCEXLCCNPAXCTXXGC

SEQ ID NO: 4729 - protein, 17 aa, Artificial Sequence
  Synthetically generated peptide
  VARIANT (1)..(17): Xaa = Any Amino Acid
CCEXLCCNPAXCTXGXC

SEQ ID NO: 4730 - protein, 16 aa, Artificial Sequence
  Synthetically generated peptide
  VARIANT (1)..(16): Xaa = Any Amino Acid
CCEXLCCNPAXCTGXC

SEQ ID NO: 4731 - protein, 17 aa, Artificial Sequence
  Synthetically generated peptide
  VARIANT (1)..(17): Xaa = Any Amino Acid
CCEXLCCNPAXCTGXXC

SEQ ID NO: 4732 - protein, 15 aa, Artificial Sequence
  Synthetically generated peptide
  VARIANT (1)..(15): Xaa = Any Amino Acid
CCEXLCCNPACXTGC

SEQ ID NO: 4733 - protein, 16 aa, Artificial Sequence
  Synthetically generated peptide
  VARIANT (1)..(16): Xaa = Any Amino Acid
CCEXLCCNPACXXTGC

SEQ ID NO: 4734 - protein, 17 aa, Artificial Sequence
  Synthetically generated peptide
  VARIANT (1)..(17): Xaa = Any Amino Acid
CCEXLCCNPACXXXTGC

SEQ ID NO: 4735 - protein, 17 aa, Artificial Sequence
  Synthetically generated peptide
  VARIANT (1)..(17): Xaa = Any Amino Acid
CCEXLCCNPACXXTXGC

SEQ ID NO: 4736 - protein, 17 aa, Artificial Sequence
  Synthetically generated peptide
  VARIANT (1)..(17): Xaa = Any Amino Acid
CCEXLCCNPACXXTGXC

SEQ ID NO: 4737 - protein, 16 aa, Artificial Sequence
  Synthetically generated peptide
  VARIANT (1)..(16): Xaa = Any Amino Acid
CCEXLCCNPACXTXGC

SEQ ID NO: 4738 - protein, 17 aa, Artificial Sequence
  Synthetically generated peptide
  VARIANT (1)..(17): Xaa = Any Amino Acid
CCEXLCCNPACXTXXGC

SEQ ID NO: 4739 - protein, 17 aa, Artificial Sequence
  Synthetically generated peptide
  VARIANT (1)..(17): Xaa = Any Amino Acid
CCEXLCCNPACXTXGXC

SEQ ID NO: 4740 - protein, 16 aa, Artificial Sequence
  Synthetically generated peptide
  VARIANT (1)..(16): Xaa = Any Amino Acid
CCEXLCCNPACXTGXC

SEQ ID NO: 4741 - protein, 17 aa, Artificial Sequence
  Synthetically generated peptide
  VARIANT (1)..(17): Xaa = Any Amino Acid
CCEXLCCNPACXTGXXC

SEQ ID NO: 4742 - protein, 15 aa, Artificial Sequence
  Synthetically generated peptide
  VARIANT (1)..(15): Xaa = Any Amino Acid
CCEXLCCNPACTXGC

SEQ ID NO: 4743 - protein, 16 aa, Artificial Sequence
  Synthetically generated peptide
  VARIANT (1)..(16): Xaa = Any Amino Acid
CCEXLCCNPACTXXGC

SEQ ID NO: 4744 - protein, 17 aa, Artificial Sequence
  Synthetically generated peptide
  VARIANT (1)..(17): Xaa = Any Amino Acid
CCEXLCCNPACTXXXGC

SEQ ID NO: 4745 - protein, 17 aa, Artificial Sequence
  Synthetically generated peptide
  VARIANT (1)..(17): Xaa = Any Amino Acid
CCEXLCCNPACTXXGXC

SEQ ID NO: 4746 - protein, 16 aa, Artificial Sequence
  Synthetically generated peptide
  VARIANT (1)..(16): Xaa = Any Amino Acid
CCEXLCCNPACTXGXC

SEQ ID NO: 4747 - protein, 17 aa, Artificial Sequence
  Synthetically generated peptide
  VARIANT (1)..(17): Xaa = Any Amino Acid
CCEXLCCNPACTXGXXC

SEQ ID NO: 4748 - protein, 15 aa, Artificial Sequence
  Synthetically generated peptide
  VARIANT (1)..(15): Xaa = Any Amino Acid
CCEXLCCNPACTGXC

SEQ ID NO: 4749 - protein, 16 aa, Artificial Sequence
  Synthetically generated peptide
  VARIANT (1)..(16): Xaa = Any Amino Acid
CCEXLCCNPACTGXXC

SEQ ID NO: 4750 - protein, 17 aa, Artificial Sequence
  Synthetically generated peptide
  VARIANT (1)..(17): Xaa = Any Amino Acid
CCEXLCCNPACTGXXXC

SEQ ID NO: 4751 - protein, 14 aa, Artificial Sequence
  Synthetically generated peptide
  VARIANT (1)..(14): Xaa = Any Amino Acid
CCELXCCNPACTGC

SEQ ID NO: 4752 - protein, 15 aa, Artificial Sequence
  Synthetically generated peptide
  VARIANT (1)..(15): Xaa = Any Amino Acid
CCELXXCCNPACTGC

SEQ ID NO: 4753 - protein, 16 aa, Artificial Sequence
  Synthetically generated peptide
  VARIANT (1)..(16): Xaa = Any Amino Acid
CCELXXXCCNPACTGC

SEQ ID NO: 4754 - protein, 17 aa, Artificial Sequence
  Synthetically generated peptide
  VARIANT (1)..(17): Xaa = Any Amino Acid
CCELXXXXCCNPACTGC

SEQ ID NO: 4755 - protein, 17 aa, Artificial Sequence
  Synthetically generated peptide
  VARIANT (1)..(17): Xaa = Any Amino Acid
CCELXXXCCXNPACTGC

SEQ ID NO: 4756 - protein, 17 aa, Artificial Sequence
  Synthetically generated peptide
  VARIANT (1)..(17): Xaa = Any Amino Acid
CCELXXXCCNXPACTGC

SEQ ID NO: 4757 - protein, 17 aa, Artificial Sequence
  Synthetically generated peptide
  VARIANT (1)..(17): Xaa = Any Amino Acid
CCELXXXCCNPXACTGC

SEQ ID NO: 4758 - protein, 17 aa, Artificial Sequence
  Synthetically generated peptide
  VARIANT (1)..(17): Xaa = Any Amino Acid
CCELXXXCCNPAXCTGC

SEQ ID NO: 4759 - protein, 17 aa, Artificial Sequence
  Synthetically generated peptide
  VARIANT (1)..(17): Xaa = Any Amino Acid
CCELXXXCCNPACXTGC

SEQ ID NO: 4760 - protein, 17 aa, Artificial Sequence
  Synthetically generated peptide
  VARIANT (1)..(17): Xaa = Any Amino Acid
CCELXXXCCNPACTXGC

SEQ ID NO: 4761 - protein, 17 aa, Artificial Sequence
  Synthetically generated peptide
  VARIANT (1)..(17): Xaa = Any Amino Acid
CCELXXXCCNPACTGXC

SEQ ID NO: 4762 - protein, 16 aa, Artificial Sequence
  Synthetically generated peptide
  VARIANT (1)..(16): Xaa = Any Amino Acid
CCELXXCCXNPACTGC

SEQ ID NO: 4763 - protein, 17 aa, Artificial Sequence
  Synthetically generated peptide
  VARIANT (1)..(17): Xaa = Any Amino Acid
CCELXXCCXXNPACTGC

SEQ ID NO: 4764 - protein, 17 aa, Artificial Sequence
  Synthetically generated peptide
  VARIANT (1)..(17): Xaa = Any Amino Acid
CCELXXCCXNXPACTGC

SEQ ID NO: 4765 - protein, 17 aa, Artificial Sequence
  Synthetically generated peptide
  VARIANT (1)..(17): Xaa = Any Amino Acid
CCELXXCCXNPXACTGC

SEQ ID NO: 4766 - protein, 17 aa, Artificial Sequence
  Synthetically generated peptide
  VARIANT (1)..(17): Xaa = Any Amino Acid
CCELXXCCXNPAXCTGC

SEQ ID NO: 4767 - protein, 17 aa, Artificial Sequence
  Synthetically generated peptide
  VARIANT (1)..(17): Xaa = Any Amino Acid
CCELXXCCXNPACXTGC

SEQ ID NO: 4768 - protein, 17 aa, Artificial Sequence
  Synthetically generated peptide
  VARIANT (1)..(17): Xaa = Any Amino Acid
CCELXXCCXNPACTXGC

SEQ ID NO: 4769 - protein, 17 aa, Artificial Sequence
  Synthetically generated peptide
  VARIANT (1)..(17): Xaa = Any Amino Acid
CCELXXCCXNPACTGXC

SEQ ID NO: 4770 - protein, 16 aa, Artificial Sequence
  Synthetically generated peptide
  VARIANT (1)..(16): Xaa = Any Amino Acid
CCELXXCCNXPACTGC

SEQ ID NO: 4771 - protein, 17 aa, Artificial Sequence
  Synthetically generated peptide
  VARIANT (1)..(17): Xaa = Any Amino Acid
CCELXXCCNXXPACTGC

SEQ ID NO: 4772 - protein, 17 aa, Artificial Sequence
  Synthetically generated peptide
  VARIANT (1)..(17): Xaa = Any Amino Acid
CCELXXCCNXPXACTGC

SEQ ID NO: 4773 - protein, 17 aa, Artificial Sequence
  Synthetically generated peptide
  VARIANT (1)..(17): Xaa = Any Amino Acid
CCELXXCCNXPAXCTGC

SEQ ID NO: 4774 - protein, 17 aa, Artificial Sequence
  Synthetically generated peptide
  VARIANT (1)..(17): Xaa = Any Amino Acid
CCELXXCCNXPACXTGC

SEQ ID NO: 4775 - protein, 17 aa, Artificial Sequence
  Synthetically generated peptide
  VARIANT (1)..(17): Xaa = Any Amino Acid
CCELXXCCNXPACTXGC

SEQ ID NO: 4776 - protein, 17 aa, Artificial Sequence
  Synthetically generated peptide
  VARIANT (1)..(17): Xaa = Any Amino Acid
CCELXXCCNXPACTGXC

SEQ ID NO: 4777 - protein, 16 aa, Artificial Sequence
  Synthetically generated peptide
  VARIANT (1)..(16): Xaa = Any Amino Acid
CCELXXCCNPXACTGC

SEQ ID NO: 4778 - protein, 17 aa, Artificial Sequence
  Synthetically generated peptide
  VARIANT (1)..(17): Xaa = Any Amino Acid
CCELXXCCNPXXACTGC

SEQ ID NO: 4779 - protein, 17 aa, Artificial Sequence
  Synthetically generated peptide
  VARIANT (1)..(17): Xaa = Any Amino Acid
CCELXXCCNPXAXCTGC

SEQ ID NO: 4780 - protein, 17 aa, Artificial Sequence
  Synthetically generated peptide
  VARIANT (1)..(17): Xaa = Any Amino Acid
CCELXXCCNPXACXTGC

SEQ ID NO: 4781 - protein, 17 aa, Artificial Sequence
  Synthetically generated peptide
  VARIANT (1)..(17): Xaa = Any Amino Acid
CCELXXCCNPXACTXGC

SEQ ID NO: 4782 - protein, 17 aa, Artificial Sequence
  Synthetically generated peptide
  VARIANT (1)..(17): Xaa = Any Amino Acid
CCELXXCCNPXACTGXC

SEQ ID NO: 4783 - protein, 16 aa, Artificial Sequence
  Synthetically generated peptide
  VARIANT (1)..(16): Xaa = Any Amino Acid
CCELXXCCNPAXCTGC

SEQ ID NO: 4784 - protein, 17 aa, Artificial Sequence
  Synthetically generated peptide
  VARIANT (1)..(17): Xaa = Any Amino Acid
CCELXXCCNPAXXCTGC

SEQ ID NO: 4785 - protein, 17 aa, Artificial Sequence
  Synthetically generated peptide
  VARIANT (1)..(17): Xaa = Any Amino Acid
CCELXXCCNPAXCXTGC

SEQ ID NO: 4786 - protein, 17 aa, Artificial Sequence
  Synthetically generated peptide
  VARIANT (1)..(17): Xaa = Any Amino Acid
CCELXXCCNPAXCTXGC

SEQ ID NO: 4787 - protein, 17 aa, Artificial Sequence
  Synthetically generated peptide
  VARIANT (1)..(17): Xaa = Any Amino Acid
CCELXXCCNPAXCTGXC

SEQ ID NO: 4788 - protein, 16 aa, Artificial Sequence
  Synthetically generated peptide
  VARIANT (1)..(16): Xaa = Any Amino Acid
CCELXXCCNPACXTGC

SEQ ID NO: 4789 - protein, 17 aa, Artificial Sequence
  Synthetically generated peptide
  VARIANT (1)..(17): Xaa = Any Amino Acid
CCELXXCCNPACXXTGC

SEQ ID NO: 4790 - protein, 17 aa, Artificial Sequence
  Synthetically generated peptide
  VARIANT (1)..(17): Xaa = Any Amino Acid
CCELXXCCNPACXTXGC

SEQ ID NO: 4791 - protein, 17 aa, Artificial Sequence
  Synthetically generated peptide
  VARIANT (1)..(17): Xaa = Any Amino Acid
CCELXXCCNPACXTGXC

SEQ ID NO: 4792 - protein, 16 aa, Artificial Sequence
  Synthetically generated peptide
  VARIANT (1)..(16): Xaa = Any Amino Acid
CCELXXCCNPACTXGC

SEQ ID NO: 4793 - protein, 17 aa, Artificial Sequence
  Synthetically generated peptide
  VARIANT (1)..(17): Xaa = Any Amino Acid
CCELXXCCNPACTXXGC

SEQ ID NO: 4794 - protein, 17 aa, Artificial Sequence
  Synthetically generated peptide
  VARIANT (1)..(17): Xaa = Any Amino Acid
CCELXXCCNPACTXGXC

SEQ ID NO: 4795 - protein, 16 aa, Artificial Sequence
  Synthetically generated peptide
  VARIANT (1)..(16): Xaa = Any Amino Acid
CCELXXCCNPACTGXC

SEQ ID NO: 4796 - protein, 17 aa, Artificial Sequence
  Synthetically generated peptide
  VARIANT (1)..(17): Xaa = Any Amino Acid
CCELXXCCNPACTGXXC

SEQ ID NO: 4797 - protein, 15 aa, Artificial Sequence
  Synthetically generated peptide
  VARIANT (1)..(15): Xaa = Any Amino Acid
CCELXCCXNPACTGC

SEQ ID NO: 4798 - protein, 16 aa, Artificial Sequence
  Synthetically generated peptide
  VARIANT (1)..(16): Xaa = Any Amino Acid
CCELXCCXXNPACTGC

SEQ ID NO: 4799 - protein, 17 aa, Artificial Sequence
  Synthetically generated peptide
  VARIANT (1)..(17): Xaa = Any Amino Acid
CCELXCCXXXNPACTGC

SEQ ID NO: 4800 - protein, 17 aa, Artificial Sequence
  Synthetically generated peptide
  VARIANT (1)..(17): Xaa = Any Amino Acid
CCELXCCXXNXPACTGC

SEQ ID NO: 4801 - protein, 17 aa, Artificial Sequence
  Synthetically generated peptide
  VARIANT (1)..(17): Xaa = Any Amino Acid
CCELXCCXXNPXACTGC

SEQ ID NO: 4802 - protein, 17 aa, Artificial Sequence
  Synthetically generated peptide
  VARIANT (1)..(17): Xaa = Any Amino Acid
CCELXCCXXNPAXCTGC

SEQ ID NO: 4803 - protein, 17 aa, Artificial Sequence
  Synthetically generated peptide
  VARIANT (1)..(17): Xaa = Any Amino Acid
CCELXCCXXNPACXTGC

SEQ ID NO: 4804 - protein, 17 aa, Artificial Sequence
  Synthetically generated peptide
  VARIANT (1)..(17): Xaa = Any Amino Acid
CCELXCCXXNPACTXGC

SEQ ID NO: 4805 - protein, 17 aa, Artificial Sequence
  Synthetically generated peptide
  VARIANT (1)..(17): Xaa = Any Amino Acid
CCELXCCXXNPACTGXC

SEQ ID NO: 4806 - protein, 16 aa, Artificial Sequence
  Synthetically generated peptide
  VARIANT (1)..(16): Xaa = Any Amino Acid
CCELXCCXNXPACTGC

SEQ ID NO: 4807 - protein, 17 aa, Artificial Sequence
  Synthetically generated peptide
  VARIANT (1)..(17): Xaa = Any Amino Acid
CCELXCCXNXXPACTGC

SEQ ID NO: 4808 - protein, 17 aa, Artificial Sequence
  Synthetically generated peptide
  VARIANT (1)..(17): Xaa = Any Amino Acid
CCELXCCXNXPXACTGC

SEQ ID NO: 4809 - protein, 17 aa, Artificial Sequence
  Synthetically generated peptide
  VARIANT (1)..(17): Xaa = Any Amino Acid
CCELXCCXNXPAXCTGC

SEQ ID NO: 4810 - protein, 17 aa, Artificial Sequence
  Synthetically generated peptide
  VARIANT (1)..(17): Xaa = Any Amino Acid
CCELXCCXNXPACXTGC

SEQ ID NO: 4811 - protein, 17 aa, Artificial Sequence
  Synthetically generated peptide
  VARIANT (1)..(17): Xaa = Any Amino Acid
CCELXCCXNXPACTXGC

SEQ ID NO: 4812 - protein, 17 aa, Artificial Sequence
  Synthetically generated peptide
  VARIANT (1)..(17): Xaa = Any Amino Acid
CCELXCCXNXPACTGXC

SEQ ID NO: 4813 - protein, 16 aa, Artificial Sequence
  Synthetically generated peptide
  VARIANT (1)..(16): Xaa = Any Amino Acid
CCELXCCXNPXACTGC

SEQ ID NO: 4814 - protein, 17 aa, Artificial Sequence
  Synthetically generated peptide
  VARIANT (1)..(17): Xaa = Any Amino Acid
CCELXCCXNPXXACTGC

SEQ ID NO: 4815 - protein, 17 aa, Artificial Sequence
  Synthetically generated peptide
  VARIANT (1)..(17): Xaa = Any Amino Acid
CCELXCCXNPXAXCTGC

SEQ ID NO: 4816 - protein, 17 aa, Artificial Sequence
  Synthetically generated peptide
  VARIANT (1)..(17): Xaa = Any Amino Acid
CCELXCCXNPXACXTGC

SEQ ID NO: 4817 - protein, 17 aa, Artificial Sequence
  Synthetically generated peptide
  VARIANT (1)..(17): Xaa = Any Amino Acid
CCELXCCXNPXACTXGC

SEQ ID NO: 4818 - protein, 17 aa, Artificial Sequence
  Synthetically generated peptide
  VARIANT (1)..(17): Xaa = Any Amino Acid
CCELXCCXNPXACTGXC

SEQ ID NO: 4819 - protein, 16 aa, Artificial Sequence
  Synthetically generated peptide
  VARIANT (1)..(16): Xaa = Any Amino Acid
CCELXCCXNPAXCTGC

SEQ ID NO: 4820 - protein, 17 aa, Artificial Sequence
  Synthetically generated peptide
  VARIANT (1)..(17): Xaa = Any Amino Acid
CCELXCCXNPAXXCTGC

SEQ ID NO: 4821 - protein, 17 aa, Artificial Sequence
  Synthetically generated peptide
  VARIANT (1)..(17): Xaa = Any Amino Acid
CCELXCCXNPAXCXTGC

SEQ ID NO: 4822 - protein, 17 aa, Artificial Sequence
  Synthetically generated peptide
  VARIANT (1)..(17): Xaa = Any Amino Acid
CCELXCCXNPAXCTXGC

SEQ ID NO: 4823 - protein, 17 aa, Artificial Sequence
  Synthetically generated peptide
  VARIANT (1)..(17): Xaa = Any Amino Acid
CCELXCCXNPAXCTGXC

SEQ ID NO: 4824 - protein, 16 aa, Artificial Sequence
  Synthetically generated peptide
  VARIANT (1)..(16): Xaa = Any Amino Acid
CCELXCCXNPACXTGC

SEQ ID NO: 4825 - protein, 17 aa, Artificial Sequence
  Synthetically generated peptide
  VARIANT (1)..(17): Xaa = Any Amino Acid
CCELXCCXNPACXXTGC

SEQ ID NO: 4826 - protein, 17 aa, Artificial Sequence
  Synthetically generated peptide
  VARIANT (1)..(17): Xaa = Any Amino Acid
CCELXCCXNPACXTXGC

SEQ ID NO: 4827 - protein, 17 aa, Artificial Sequence
  Synthetically generated peptide
  VARIANT (1)..(17): Xaa = Any Amino Acid
CCELXCCXNPACXTGXC

SEQ ID NO: 4828 - protein, 16 aa, Artificial Sequence
  Synthetically generated peptide
  VARIANT (1)..(16): Xaa = Any Amino Acid
CCELXCCXNPACTXGC

SEQ ID NO: 4829 - protein, 17 aa, Artificial Sequence
  Synthetically generated peptide
  VARIANT (1)..(17): Xaa = Any Amino Acid
CCELXCCXNPACTXXGC

SEQ ID NO: 4830 - protein, 17 aa, Artificial Sequence
  Synthetically generated peptide
  VARIANT (1)..(17): Xaa = Any Amino Acid
CCELXCCXNPACTXGXC

SEQ ID NO: 4831 - protein, 16 aa, Artificial Sequence
  Synthetically generated peptide
  VARIANT (1)..(16): Xaa = Any Amino Acid
CCELXCCXNPACTGXC

SEQ ID NO: 4832 - protein, 17 aa, Artificial Sequence
  Synthetically generated peptide
  VARIANT (1)..(17): Xaa = Any Amino Acid
CCELXCCXNPACTGXXC

SEQ ID NO: 4833 - protein, 15 aa, Artificial Sequence
  Synthetically generated peptide
  VARIANT (1)..(15): Xaa = Any Amino Acid
CCELXCCNXPACTGC

SEQ ID NO: 4834 - protein, 16 aa, Artificial Sequence
  Synthetically generated peptide
  VARIANT (1)..(16): Xaa = Any Amino Acid
CCELXCCNXXPACTGC

SEQ ID NO: 4835 - protein, 17 aa, Artificial Sequence
  Synthetically generated peptide
  VARIANT (1)..(17): Xaa = Any Amino Acid
CCELXCCNXXXPACTGC

SEQ ID NO: 4836 - protein, 17 aa, Artificial Sequence
  Synthetically generated peptide
  VARIANT (1)..(17): Xaa = Any Amino Acid
CCELXCCNXXPXACTGC

SEQ ID NO: 4837 - protein, 17 aa, Artificial Sequence
  Synthetically generated peptide
  VARIANT (1)..(17): Xaa = Any Amino Acid
CCELXCCNXXPAXCTGC

SEQ ID NO: 4838 - protein, 17 aa, Artificial Sequence
  Synthetically generated peptide
  VARIANT (1)..(17): Xaa = Any Amino Acid
CCELXCCNXXPACXTGC

SEQ ID NO: 4839 - protein, 17 aa, Artificial Sequence
  Synthetically generated peptide
  VARIANT (1)..(17): Xaa = Any Amino Acid
CCELXCCNXXPACTXGC

SEQ ID NO: 4840 - protein, 17 aa, Artificial Sequence
  Synthetically generated peptide
  VARIANT (1)..(17): Xaa = Any Amino Acid
CCELXCCNXXPACTGXC

SEQ ID NO: 4841 - protein, 16 aa, Artificial Sequence
  Synthetically generated peptide
  VARIANT (1)..(16): Xaa = Any Amino Acid
CCELXCCNXPXACTGC

SEQ ID NO: 4842 - protein, 17 aa, Artificial Sequence
  Synthetically generated peptide
  VARIANT (1)..(17): Xaa = Any Amino Acid
CCELXCCNXPXXACTGC

SEQ ID NO: 4843 - protein, 17 aa, Artificial Sequence
  Synthetically generated peptide
  VARIANT (1)..(17): Xaa = Any Amino Acid
CCELXCCNXPXAXCTGC

SEQ ID NO: 4844 - protein, 17 aa, Artificial Sequence
  Synthetically generated peptide
  VARIANT (1)..(17): Xaa = Any Amino Acid
CCELXCCNXPXACXTGC

SEQ ID NO: 4845 - protein, 17 aa, Artificial Sequence
  Synthetically generated peptide
  VARIANT (1)..(17): Xaa = Any Amino Acid
CCELXCCNXPXACTXGC

SEQ ID NO: 4846 - protein, 17 aa, Artificial Sequence
  Synthetically generated peptide
  VARIANT (1)..(17): Xaa = Any Amino Acid
CCELXCCNXPXACTGXC

SEQ ID NO: 4847 - protein, 16 aa, Artificial Sequence
  Synthetically generated peptide
  VARIANT (1)..(16): Xaa = Any Amino Acid
CCELXCCNXPAXCTGC

SEQ ID NO: 4848 - protein, 17 aa, Artificial Sequence
  Synthetically generated peptide
  VARIANT (1)..(17): Xaa = Any Amino Acid
CCELXCCNXPAXXCTGC

SEQ ID NO: 4849 - protein, 17 aa, Artificial Sequence
  Synthetically generated peptide
  VARIANT (1)..(17): Xaa = Any Amino Acid
CCELXCCNXPAXCXTGC

SEQ ID NO: 4850 - protein, 17 aa, Artificial Sequence
  Synthetically generated peptide
  VARIANT (1)..(17): Xaa = Any Amino Acid
CCELXCCNXPAXCTXGC

SEQ ID NO: 4851 - protein, 17 aa, Artificial Sequence
  Synthetically generated peptide
  VARIANT (1)..(17): Xaa = Any Amino Acid
CCELXCCNXPAXCTGXC

SEQ ID NO: 4852 - protein, 16 aa, Artificial Sequence
  Synthetically generated peptide
  VARIANT (1)..(16): Xaa = Any Amino Acid
CCELXCCNXPACXTGC

SEQ ID NO: 4853 - protein, 17 aa, Artificial Sequence
  Synthetically generated peptide
  VARIANT (1)..(17): Xaa = Any Amino Acid
CCELXCCNXPACXXTGC

SEQ ID NO: 4854 - protein, 17 aa, Artificial Sequence
  Synthetically generated peptide
  VARIANT (1)..(17): Xaa = Any Amino Acid
CCELXCCNXPACXTXGC

SEQ ID NO: 4855 - protein, 17 aa, Artificial Sequence
  Synthetically generated peptide
  VARIANT (1)..(17): Xaa = Any Amino Acid
CCELXCCNXPACXTGXC

SEQ ID NO: 4856 - protein, 16 aa, Artificial Sequence
  Synthetically generated peptide
  VARIANT (1)..(16): Xaa = Any Amino Acid
CCELXCCNXPACTXGC

SEQ ID NO: 4857 - protein, 17 aa, Artificial Sequence
  Synthetically generated peptide
  VARIANT (1)..(17): Xaa = Any Amino Acid
CCELXCCNXPACTXXGC

SEQ ID NO: 4858 - protein, 17 aa, Artificial Sequence
  Synthetically generated peptide
  VARIANT (1)..(17): Xaa = Any Amino Acid
CCELXCCNXPACTXGXC

SEQ ID NO: 4859 - protein, 16 aa, Artificial Sequence
  Synthetically generated peptide
  VARIANT (1)..(16): Xaa = Any Amino Acid
CCELXCCNXPACTGXC

SEQ ID NO: 4860 - protein, 17 aa, Artificial Sequence
  Synthetically generated peptide
  VARIANT (1)..(17): Xaa = Any Amino Acid
CCELXCCNXPACTGXXC

SEQ ID NO: 4861 - protein, 15 aa, Artificial Sequence
  Synthetically generated peptide
  VARIANT (1)..(15): Xaa = Any Amino Acid
CCELXCCNPXACTGC

SEQ ID NO: 4862 - protein, 16 aa, Artificial Sequence
  Synthetically generated peptide
  VARIANT (1)..(16): Xaa = Any Amino Acid
CCELXCCNPXXACTGC

SEQ ID NO: 4863 - protein, 17 aa, Artificial Sequence
  Synthetically generated peptide
  VARIANT (1)..(17): Xaa = Any Amino Acid
CCELXCCNPXXXACTGC

SEQ ID NO: 4864 - protein, 17 aa, Artificial Sequence
  Synthetically generated peptide
  VARIANT (1)..(17): Xaa = Any Amino Acid
CCELXCCNPXXAXCTGC

SEQ ID NO: 4865 - protein, 17 aa, Artificial Sequence
  Synthetically generated peptide
  VARIANT (1)..(17): Xaa = Any Amino Acid
CCELXCCNPXXACXTGC

SEQ ID NO: 4866 - protein, 17 aa, Artificial Sequence
  Synthetically generated peptide
  VARIANT (1)..(17): Xaa = Any Amino Acid
CCELXCCNPXXACTXGC

SEQ ID NO: 4867 - protein, 17 aa, Artificial Sequence
  Synthetically generated peptide
  VARIANT (1)..(17): Xaa = Any Amino Acid
CCELXCCNPXXACTGXC

SEQ ID NO: 4868 - protein, 16 aa, Artificial Sequence
  Synthetically generated peptide
  VARIANT (1)..(16): Xaa = Any Amino Acid
CCELXCCNPXAXCTGC

SEQ ID NO: 4869 - protein, 17 aa, Artificial Sequence
  Synthetically generated peptide
  VARIANT (1)..(17): Xaa = Any Amino Acid
CCELXCCNPXAXXCTGC

SEQ ID NO: 4870 - protein, 17 aa, Artificial Sequence
  Synthetically generated peptide
  VARIANT (1)..(17): Xaa = Any Amino Acid
CCELXCCNPXAXCXTGC

SEQ ID NO: 4871 - protein, 17 aa, Artificial Sequence
  Synthetically generated peptide
  VARIANT (1)..(17): Xaa = Any Amino Acid
CCELXCCNPXAXCTXGC

SEQ ID NO: 4872 - protein, 17 aa, Artificial Sequence
  Synthetically generated peptide
  VARIANT (1)..(17): Xaa = Any Amino Acid
CCELXCCNPXAXCTGXC

SEQ ID NO: 4873 - protein, 16 aa, Artificial Sequence
  Synthetically generated peptide
  VARIANT (1)..(16): Xaa = Any Amino Acid
CCELXCCNPXACXTGC

SEQ ID NO: 4874 - protein, 17 aa, Artificial Sequence
  Synthetically generated peptide
  VARIANT (1)..(17): Xaa = Any Amino Acid
CCELXCCNPXACXXTGC

SEQ ID NO: 4875 - protein, 17 aa, Artificial Sequence
  Synthetically generated peptide
  VARIANT (1)..(17): Xaa = Any Amino Acid
CCELXCCNPXACXTXGC

SEQ ID NO: 4876 - protein, 17 aa, Artificial Sequence
  Synthetically generated peptide
  VARIANT (1)..(17): Xaa = Any Amino Acid
CCELXCCNPXACXTGXC

SEQ ID NO: 4877 - protein, 16 aa, Artificial Sequence
  Synthetically generated peptide
  VARIANT (1)..(16): Xaa = Any Amino Acid
CCELXCCNPXACTXGC

SEQ ID NO: 4878 - protein, 17 aa, Artificial Sequence
  Synthetically generated peptide
  VARIANT (1)..(17): Xaa = Any Amino Acid
CCELXCCNPXACTXXGC

SEQ ID NO: 4879 - protein, 17 aa, Artificial Sequence
  Synthetically generated peptide
  VARIANT (1)..(17): Xaa = Any Amino Acid
CCELXCCNPXACTXGXC

SEQ ID NO: 4880 - protein, 16 aa, Artificial Sequence
  Synthetically generated peptide
  VARIANT (1)..(16): Xaa = Any Amino Acid
CCELXCCNPXACTGXC

SEQ ID NO: 4881 - protein, 17 aa, Artificial Sequence
  Synthetically generated peptide
  VARIANT (1)..(17): Xaa = Any Amino Acid
CCELXCCNPXACTGXXC

SEQ ID NO: 4882 - protein, 15 aa, Artificial Sequence
  Synthetically generated peptide
  VARIANT (1)..(15): Xaa = Any Amino Acid
CCELXCCNPAXCTGC

SEQ ID NO: 4883 - protein, 16 aa, Artificial Sequence
  Synthetically generated peptide
  VARIANT (1)..(16): Xaa = Any Amino Acid
CCELXCCNPAXXCTGC

SEQ ID NO: 4884 - protein, 17 aa, Artificial Sequence
  Synthetically generated peptide
  VARIANT (1)..(17): Xaa = Any Amino Acid
CCELXCCNPAXXXCTGC

SEQ ID NO: 4885 - protein, 17 aa, Artificial Sequence
  Synthetically generated peptide
  VARIANT (1)..(17): Xaa = Any Amino Acid
CCELXCCNPAXXCXTGC

SEQ ID NO: 4886 - protein, 17 aa, Artificial Sequence
  Synthetically generated peptide
  VARIANT (1)..(17): Xaa = Any Amino Acid
CCELXCCNPAXXCTXGC

SEQ ID NO: 4887 - protein, 17 aa, Artificial Sequence
  Synthetically generated peptide
  VARIANT (1)..(17): Xaa = Any Amino Acid
CCELXCCNPAXXCTGXC

SEQ ID NO: 4888 - protein, 16 aa, Artificial Sequence
  Synthetically generated peptide
  VARIANT (1)..(16): Xaa = Any Amino Acid
CCELXCCNPAXCXTGC

SEQ ID NO: 4889 - protein, 17 aa, Artificial Sequence
  Synthetically generated peptide
  VARIANT (1)..(17): Xaa = Any Amino Acid
CCELXCCNPAXCXXTGC

SEQ ID NO: 4890 - protein, 17 aa, Artificial Sequence
  Synthetically generated peptide
  VARIANT (1)..(17): Xaa = Any Amino Acid
CCELXCCNPAXCXTXGC

SEQ ID NO: 4891 - protein, 17 aa, Artificial Sequence
  Synthetically generated peptide
  VARIANT (1)..(17): Xaa = Any Amino Acid
CCELXCCNPAXCXTGXC

SEQ ID NO: 4892 - protein, 16 aa, Artificial Sequence
  Synthetically generated peptide
  VARIANT (1)..(16): Xaa = Any Amino Acid
CCELXCCNPAXCTXGC

SEQ ID NO: 4893 - protein, 17 aa, Artificial Sequence
  Synthetically generated peptide
  VARIANT (1)..(17): Xaa = Any Amino Acid
CCELXCCNPAXCTXXGC

SEQ ID NO: 4894 - protein, 17 aa, Artificial Sequence
  Synthetically generated peptide
  VARIANT (1)..(17): Xaa = Any Amino Acid
CCELXCCNPAXCTXGXC

SEQ ID NO: 4895 - protein, 16 aa, Artificial Sequence
  Synthetically generated peptide
  VARIANT (1)..(16): Xaa = Any Amino Acid
CCELXCCNPAXCTGXC

SEQ ID NO: 4896 - protein, 17 aa, Artificial Sequence
  Synthetically generated peptide
  VARIANT (1)..(17): Xaa = Any Amino Acid
CCELXCCNPAXCTGXXC

SEQ ID NO: 4897 - protein, 15 aa, Artificial Sequence
  Synthetically generated peptide
  VARIANT (1)..(15): Xaa = Any Amino Acid
CCELXCCNPACXTGC

SEQ ID NO: 4898 - protein, 16 aa, Artificial Sequence
  Synthetically generated peptide
  VARIANT (1)..(16): Xaa = Any Amino Acid
CCELXCCNPACXXTGC

SEQ ID NO: 4899 - protein, 17 aa, Artificial Sequence
  Synthetically generated peptide
  VARIANT (1)..(17): Xaa = Any Amino Acid
CCELXCCNPACXXXTGC

SEQ ID NO: 4900 - protein, 17 aa, Artificial Sequence
  Synthetically generated peptide
  VARIANT (1)..(17): Xaa = Any Amino Acid
CCELXCCNPACXXTXGC

SEQ ID NO: 4901 - protein, 17 aa, Artificial Sequence
  Synthetically generated peptide
  VARIANT (1)..(17): Xaa = Any Amino Acid
CCELXCCNPACXXTGXC

SEQ ID NO: 4902 - protein, 16 aa, Artificial Sequence
  Synthetically generated peptide
  VARIANT (1)..(16): Xaa = Any Amino Acid
CCELXCCNPACXTXGC

SEQ ID NO: 4903 - protein, 17 aa, Artificial Sequence
  Synthetically generated peptide
  VARIANT (1)..(17): Xaa = Any Amino Acid
CCELXCCNPACXTXXGC

SEQ ID NO: 4904 - protein, 17 aa, Artificial Sequence
  Synthetically generated peptide
  VARIANT (1)..(17): Xaa = Any Amino Acid
CCELXCCNPACXTXGXC

SEQ ID NO: 4905 - protein, 16 aa, Artificial Sequence
  Synthetically generated peptide
  VARIANT (1)..(16): Xaa = Any Amino Acid
CCELXCCNPACXTGXC

SEQ ID NO: 4906 - protein, 17 aa, Artificial Sequence
  Synthetically generated peptide
  VARIANT (1)..(17): Xaa = Any Amino Acid
CCELXCCNPACXTGXXC

SEQ ID NO: 4907 - protein, 15 aa, Artificial Sequence
  Synthetically generated peptide
  VARIANT (1)..(15): Xaa = Any Amino Acid
CCELXCCNPACTXGC

SEQ ID NO: 4908 - protein, 16 aa, Artificial Sequence
  Synthetically generated peptide
  VARIANT (1)..(16): Xaa = Any Amino Acid
CCELXCCNPACTXXGC

SEQ ID NO: 4909 - protein, 17 aa, Artificial Sequence
  Synthetically generated peptide
  VARIANT (1)..(17): Xaa = Any Amino Acid
CCELXCCNPACTXXXGC

SEQ ID NO: 4910 - protein, 17 aa, Artificial Sequence
  Synthetically generated peptide
  VARIANT (1)..(17): Xaa = Any Amino Acid
CCELXCCNPACTXXGXC

SEQ ID NO: 4911 - protein, 16 aa, Artificial Sequence
  Synthetically generated peptide
  VARIANT (1)..(16): Xaa = Any Amino Acid
CCELXCCNPACTXGXC

SEQ ID NO: 4912 - protein, 17 aa, Artificial Sequence
  Synthetically generated peptide
  VARIANT (1)..(17): Xaa = Any Amino Acid
CCELXCCNPACTXGXXC

SEQ ID NO: 4913 - protein, 15 aa, Artificial Sequence
  Synthetically generated peptide
  VARIANT (1)..(15): Xaa = Any Amino Acid
CCELXCCNPACTGXC

SEQ ID NO: 4914 - protein, 16 aa, Artificial Sequence
  Synthetically generated peptide
  VARIANT (1)..(16): Xaa = Any Amino Acid
CCELXCCNPACTGXXC

SEQ ID NO: 4915 - protein, 17 aa, Artificial Sequence
  Synthetically generated peptide
  VARIANT (1)..(17): Xaa = Any Amino Acid
CCELXCCNPACTGXXXC

SEQ ID NO: 4916 - protein, 14 aa, Artificial Sequence
  Synthetically generated peptide
  VARIANT (1)..(14): Xaa = Any Amino Acid
CCELCCXNPACTGC

SEQ ID NO: 4917 - protein, 15 aa, Artificial Sequence
  Synthetically generated peptide
  VARIANT (1)..(15): Xaa = Any Amino Acid
CCELCCXXNPACTGC

SEQ ID NO: 4918 - protein, 16 aa, Artificial Sequence
  Synthetically generated peptide
  VARIANT (1)..(16): Xaa = Any Amino Acid
CCELCCXXXNPACTGC

SEQ ID NO: 4919 - protein, 17 aa, Artificial Sequence
  Synthetically generated peptide
  VARIANT (1)..(17): Xaa = Any Amino Acid
CCELCCXXXXNPACTGC

SEQ ID NO: 4920 - protein, 17 aa, Artificial Sequence
  Synthetically generated peptide
  VARIANT (1)..(17): Xaa = Any Amino Acid
CCELCCXXXNXPACTGC

SEQ ID NO: 4921 - protein, 17 aa, Artificial Sequence
  Synthetically generated peptide
  VARIANT (1)..(17): Xaa = Any Amino Acid
CCELCCXXXNPXACTGC

SEQ ID NO: 4922 - protein, 17 aa, Artificial Sequence
  Synthetically generated peptide
  VARIANT (1)..(17): Xaa = Any Amino Acid
CCELCCXXXNPAXCTGC

SEQ ID NO: 4923 - protein, 17 aa, Artificial Sequence
  Synthetically generated peptide
  VARIANT (1)..(17): Xaa = Any Amino Acid
CCELCCXXXNPACXTGC

SEQ ID NO: 4924 - protein, 17 aa, Artificial Sequence
  Synthetically generated peptide
  VARIANT (1)..(17): Xaa = Any Amino Acid
CCELCCXXXNPACTXGC

SEQ ID NO: 4925 - protein, 17 aa, Artificial Sequence
  Synthetically generated peptide
  VARIANT (1)..(17): Xaa = Any Amino Acid
CCELCCXXXNPACTGXC

SEQ ID NO: 4926 - protein, 16 aa, Artificial Sequence
  Synthetically generated peptide
  VARIANT (1)..(16): Xaa = Any Amino Acid
CCELCCXXNXPACTGC

SEQ ID NO: 4927 - protein, 17 aa, Artificial Sequence
  Synthetically generated peptide
  VARIANT (1)..(17): Xaa = Any Amino Acid
CCELCCXXNXXPACTGC

SEQ ID NO: 4928 - protein, 17 aa, Artificial Sequence
  Synthetically generated peptide
  VARIANT (1)..(17): Xaa = Any Amino Acid
CCELCCXXNXPXACTGC

SEQ ID NO: 4929 - protein, 17 aa, Artificial Sequence
  Synthetically generated peptide
  VARIANT (1)..(17): Xaa = Any Amino Acid
CCELCCXXNXPAXCTGC

SEQ ID NO: 4930 - protein, 17 aa, Artificial Sequence
  Synthetically generated peptide
  VARIANT (1)..(17): Xaa = Any Amino Acid
CCELCCXXNXPACXTGC

SEQ ID NO: 4931 - protein, 17 aa, Artificial Sequence
  Synthetically generated peptide
  VARIANT (1)..(17): Xaa = Any Amino Acid
CCELCCXXNXPACTXGC

SEQ ID NO: 4932 - protein, 17 aa, Artificial Sequence
  Synthetically generated peptide
  VARIANT (1)..(17): Xaa = Any Amino Acid
CCELCCXXNXPACTGXC

SEQ ID NO: 4933 - protein, 16 aa, Artificial Sequence
  Synthetically generated peptide
  VARIANT (1)..(16): Xaa = Any Amino Acid
CCELCCXXNPXACTGC

SEQ ID NO: 4934 - protein, 17 aa, Artificial Sequence
  Synthetically generated peptide
  VARIANT (1)..(17): Xaa = Any Amino Acid
CCELCCXXNPXXACTGC

SEQ ID NO: 4935 - protein, 17 aa, Artificial Sequence
  Synthetically generated peptide
  VARIANT (1)..(17): Xaa = Any Amino Acid
CCELCCXXNPXAXCTGC

SEQ ID NO: 4936 - protein, 17 aa, Artificial Sequence
  Synthetically generated peptide
  VARIANT (1)..(17): Xaa = Any Amino Acid
CCELCCXXNPXACXTGC

SEQ ID NO: 4937 - protein, 17 aa, Artificial Sequence
  Synthetically generated peptide
  VARIANT (1)..(17): Xaa = Any Amino Acid
CCELCCXXNPXACTXGC

SEQ ID NO: 4938 - protein, 17 aa, Artificial Sequence
  Synthetically generated peptide
  VARIANT (1)..(17): Xaa = Any Amino Acid
CCELCCXXNPXACTGXC

SEQ ID NO: 4939 - protein, 16 aa, Artificial Sequence
  Synthetically generated peptide
  VARIANT (1)..(16): Xaa = Any Amino Acid
CCELCCXXNPAXCTGC

SEQ ID NO: 4940 - protein, 17 aa, Artificial Sequence
  Synthetically generated peptide
  VARIANT (1)..(17): Xaa = Any Amino Acid
CCELCCXXNPAXXCTGC

SEQ ID NO: 4941 - protein, 17 aa, Artificial Sequence
  Synthetically generated peptide
  VARIANT (1)..(17): Xaa = Any Amino Acid
CCELCCXXNPAXCXTGC

SEQ ID NO: 4942 - protein, 17 aa, Artificial Sequence
  Synthetically generated peptide
  VARIANT (1)..(17): Xaa = Any Amino Acid
CCELCCXXNPAXCTXGC

SEQ ID NO: 4943 - protein, 17 aa, Artificial Sequence
  Synthetically generated peptide
  VARIANT (1)..(17): Xaa = Any Amino Acid
CCELCCXXNPAXCTGXC

SEQ ID NO: 4944 - protein, 16 aa, Artificial Sequence
  Synthetically generated peptide
  VARIANT (1)..(16): Xaa = Any Amino Acid
CCELCCXXNPACXTGC

SEQ ID NO: 4945 - protein, 17 aa, Artificial Sequence
  Synthetically generated peptide
  VARIANT (1)..(17): Xaa = Any Amino Acid
CCELCCXXNPACXXTGC

SEQ ID NO: 4946 - protein, 17 aa, Artificial Sequence
  Synthetically generated peptide
  VARIANT (1)..(17): Xaa = Any Amino Acid
CCELCCXXNPACXTXGC

SEQ ID NO: 4947 - protein, 17 aa, Artificial Sequence
  Synthetically generated peptide
  VARIANT (1)..(17): Xaa = Any Amino Acid
CCELCCXXNPACXTGXC

SEQ ID NO: 4948 - protein, 16 aa, Artificial Sequence
  Synthetically generated peptide
  VARIANT (1)..(16): Xaa = Any Amino Acid
CCELCCXXNPACTXGC

SEQ ID NO: 4949 - protein, 17 aa, Artificial Sequence
  Synthetically generated peptide
  VARIANT (1)..(17): Xaa = Any Amino Acid
CCELCCXXNPACTXXGC

SEQ ID NO: 4950 - protein, 17 aa, Artificial Sequence
  Synthetically generated peptide
  VARIANT (1)..(17): Xaa = Any Amino Acid
CCELCCXXNPACTXGXC

SEQ ID NO: 4951 - protein, 16 aa, Artificial Sequence
  Synthetically generated peptide
  VARIANT (1)..(16): Xaa = Any Amino Acid
CCELCCXXNPACTGXC

SEQ ID NO: 4952 - protein, 17 aa, Artificial Sequence
  Synthetically generated peptide
  VARIANT (1)..(17): Xaa = Any Amino Acid
CCELCCXXNPACTGXXC

SEQ ID NO: 4953 - protein, 15 aa, Artificial Sequence
  Synthetically generated peptide
  VARIANT (1)..(15): Xaa = Any Amino Acid
CCELCCXNXPACTGC

SEQ ID NO: 4954 - protein, 16 aa, Artificial Sequence
  Synthetically generated peptide
  VARIANT (1)..(16): Xaa = Any Amino Acid
CCELCCXNXXPACTGC

SEQ ID NO: 4955 - protein, 17 aa, Artificial Sequence
  Synthetically generated peptide
  VARIANT (1)..(17): Xaa = Any Amino Acid
CCELCCXNXXXPACTGC

SEQ ID NO: 4956 - protein, 17 aa, Artificial Sequence
  Synthetically generated peptide
  VARIANT (1)..(17): Xaa = Any Amino Acid
CCELCCXNXXPXACTGC

SEQ ID NO: 4957 - protein, 17 aa, Artificial Sequence
  Synthetically generated peptide
  VARIANT (1)..(17): Xaa = Any Amino Acid
CCELCCXNXXPAXCTGC

SEQ ID NO: 4958 - protein, 17 aa, Artificial Sequence
  Synthetically generated peptide
  VARIANT (1)..(17): Xaa = Any Amino Acid
CCELCCXNXXPACXTGC

SEQ ID NO: 4959 - protein, 17 aa, Artificial Sequence
  Synthetically generated peptide
  VARIANT (1)..(17): Xaa = Any Amino Acid
CCELCCXNXXPACTXGC

SEQ ID NO: 4960 - protein, 17 aa, Artificial Sequence
  Synthetically generated peptide
  VARIANT (1)..(17): Xaa = Any Amino Acid
CCELCCXNXXPACTGXC

SEQ ID NO: 4961 - protein, 16 aa, Artificial Sequence
  Synthetically generated peptide
  VARIANT (1)..(16): Xaa = Any Amino Acid
CCELCCXNXPXACTGC

SEQ ID NO: 4962 - protein, 17 aa, Artificial Sequence
  Synthetically generated peptide
  VARIANT (1)..(17): Xaa = Any Amino Acid
CCELCCXNXPXXACTGC

SEQ ID NO: 4963 - protein, 17 aa, Artificial Sequence
  Synthetically generated peptide
  VARIANT (1)..(17): Xaa = Any Amino Acid
CCELCCXNXPXAXCTGC

SEQ ID NO: 4964 - protein, 17 aa, Artificial Sequence
  Synthetically generated peptide
  VARIANT (1)..(17): Xaa = Any Amino Acid
CCELCCXNXPXACXTGC

SEQ ID NO: 4965 - protein, 17 aa, Artificial Sequence
  Synthetically generated peptide
  VARIANT (1)..(17): Xaa = Any Amino Acid
CCELCCXNXPXACTXGC

SEQ ID NO: 4966 - protein, 17 aa, Artificial Sequence
  Synthetically generated peptide
  VARIANT (1)..(17): Xaa = Any Amino Acid
CCELCCXNXPXACTGXC

SEQ ID NO: 4967 - protein, 16 aa, Artificial Sequence
  Synthetically generated peptide
  VARIANT (1)..(16): Xaa = Any Amino Acid
CCELCCXNXPAXCTGC

SEQ ID NO: 4968 - protein, 17 aa, Artificial Sequence
  Synthetically generated peptide
  VARIANT (1)..(17): Xaa = Any Amino Acid
CCELCCXNXPAXXCTGC

SEQ ID NO: 4969 - protein, 17 aa, Artificial Sequence
  Synthetically generated peptide
  VARIANT (1)..(17): Xaa = Any Amino Acid
CCELCCXNXPAXCXTGC

SEQ ID NO: 4970 - protein, 17 aa, Artificial Sequence
  Synthetically generated peptide
  VARIANT (1)..(17): Xaa = Any Amino Acid
CCELCCXNXPAXCTXGC

SEQ ID NO: 4971 - protein, 17 aa, Artificial Sequence
  Synthetically generated peptide
  VARIANT (1)..(17): Xaa = Any Amino Acid
CCELCCXNXPAXCTGXC

SEQ ID NO: 4972 - protein, 16 aa, Artificial Sequence
  Synthetically generated peptide
  VARIANT (1)..(16): Xaa = Any Amino Acid
CCELCCXNXPACXTGC

SEQ ID NO: 4973 - protein, 17 aa, Artificial Sequence
  Synthetically generated peptide
  VARIANT (1)..(17): Xaa = Any Amino Acid
CCELCCXNXPACXXTGC

SEQ ID NO: 4974 - protein, 17 aa, Artificial Sequence
  Synthetically generated peptide
  VARIANT (1)..(17): Xaa = Any Amino Acid
CCELCCXNXPACXTXGC

SEQ ID NO: 4975 - protein, 17 aa, Artificial Sequence
  Synthetically generated peptide
  VARIANT (1)..(17): Xaa = Any Amino Acid
CCELCCXNXPACXTGXC

SEQ ID NO: 4976 - protein, 16 aa, Artificial Sequence
  Synthetically generated peptide
  VARIANT (1)..(16): Xaa = Any Amino Acid
CCELCCXNXPACTXGC

SEQ ID NO: 4977 - protein, 17 aa, Artificial Sequence
  Synthetically generated peptide
  VARIANT (1)..(17): Xaa = Any Amino Acid
CCELCCXNXPACTXXGC

SEQ ID NO: 4978 - protein, 17 aa, Artificial Sequence
  Synthetically generated peptide
  VARIANT (1)..(17): Xaa = Any Amino Acid
CCELCCXNXPACTXGXC

SEQ ID NO: 4979 - protein, 16 aa, Artificial Sequence
  Synthetically generated peptide
  VARIANT (1)..(16): Xaa = Any Amino Acid
CCELCCXNXPACTGXC

SEQ ID NO: 4980 - protein, 17 aa, Artificial Sequence
  Synthetically generated peptide
  VARIANT (1)..(17): Xaa = Any Amino Acid
CCELCCXNXPACTGXXC

SEQ ID NO: 4981 - protein, 15 aa, Artificial Sequence
  Synthetically generated peptide
  VARIANT (1)..(15): Xaa = Any Amino Acid
CCELCCXNPXACTGC

SEQ ID NO: 4982 - protein, 16 aa, Artificial Sequence
  Synthetically generated peptide
  VARIANT (1)..(16): Xaa = Any Amino Acid
CCELCCXNPXXACTGC

SEQ ID NO: 4983 - protein, 17 aa, Artificial Sequence
  Synthetically generated peptide
  VARIANT (1)..(17): Xaa = Any Amino Acid
CCELCCXNPXXXACTGC

SEQ ID NO: 4984 - protein, 17 aa, Artificial Sequence
  Synthetically generated peptide
  VARIANT (1)..(17): Xaa = Any Amino Acid
CCELCCXNPXXAXCTGC

SEQ ID NO: 4985 - protein, 17 aa, Artificial Sequence
  Synthetically generated peptide
  VARIANT (1)..(17): Xaa = Any Amino Acid
CCELCCXNPXXACXTGC

SEQ ID NO: 4986 - protein, 17 aa, Artificial Sequence
  Synthetically generated peptide
  VARIANT (1)..(17): Xaa = Any Amino Acid
CCELCCXNPXXACTXGC

SEQ ID NO: 4987 - protein, 17 aa, Artificial Sequence
  Synthetically generated peptide
  VARIANT (1)..(17): Xaa = Any Amino Acid
CCELCCXNPXXACTGXC

SEQ ID NO: 4988 - protein, 16 aa, Artificial Sequence
  Synthetically generated peptide
  VARIANT (1)..(16): Xaa = Any Amino Acid
CCELCCXNPXAXCTGC

SEQ ID NO: 4989 - protein, 17 aa, Artificial Sequence
  Synthetically generated peptide
  VARIANT (1)..(17): Xaa = Any Amino Acid
CCELCCXNPXAXXCTGC

SEQ ID NO: 4990 - protein, 17 aa, Artificial Sequence
  Synthetically generated peptide
  VARIANT (1)..(17): Xaa = Any Amino Acid
CCELCCXNPXAXCXTGC

SEQ ID NO: 4991 - protein, 17 aa, Artificial Sequence
  Synthetically generated peptide
  VARIANT (1)..(17): Xaa = Any Amino Acid
CCELCCXNPXAXCTXGC

SEQ ID NO: 4992 - protein, 17 aa, Artificial Sequence
  Synthetically generated peptide
  VARIANT (1)..(17): Xaa = Any Amino Acid
CCELCCXNPXAXCTGXC

SEQ ID NO: 4993 - protein, 16 aa, Artificial Sequence
  Synthetically generated peptide
  VARIANT (1)..(16): Xaa = Any Amino Acid
CCELCCXNPXACXTGC

SEQ ID NO: 4994 - protein, 17 aa, Artificial Sequence
  Synthetically generated peptide
  VARIANT (1)..(17): Xaa = Any Amino Acid
CCELCCXNPXACXXTGC

SEQ ID NO: 4995 - protein, 17 aa, Artificial Sequence
  Synthetically generated peptide
  VARIANT (1)..(17): Xaa = Any Amino Acid
CCELCCXNPXACXTXGC

SEQ ID NO: 4996 - protein, 17 aa, Artificial Sequence
  Synthetically generated peptide
  VARIANT (1)..(17): Xaa = Any Amino Acid
CCELCCXNPXACXTGXC

SEQ ID NO: 4997 - protein, 16 aa, Artificial Sequence
  Synthetically generated peptide
  VARIANT (1)..(16): Xaa = Any Amino Acid
CCELCCXNPXACTXGC

SEQ ID NO: 4998 - protein, 17 aa, Artificial Sequence
  Synthetically generated peptide
  VARIANT (1)..(17): Xaa = Any Amino Acid
CCELCCXNPXACTXXGC

SEQ ID NO: 4999 - protein, 17 aa, Artificial Sequence
  Synthetically generated peptide
  VARIANT (1)..(17): Xaa = Any Amino Acid
CCELCCXNPXACTXGXC

SEQ ID NO: 5000 - protein, 16 aa, Artificial Sequence
  Synthetically generated peptide
  VARIANT (1)..(16): Xaa = Any Amino Acid
CCELCCXNPXACTGXC

SEQ ID NO: 5001 - protein, 17 aa, Artificial Sequence
  Synthetically generated peptide
  VARIANT (1)..(17): Xaa = Any Amino Acid
CCELCCXNPXACTGXXC

SEQ ID NO: 5002 - protein, 15 aa, Artificial Sequence
  Synthetically generated peptide
  VARIANT (1)..(15): Xaa = Any Amino Acid
CCELCCXNPAXCTGC

SEQ ID NO: 5003 - protein, 16 aa, Artificial Sequence
  Synthetically generated peptide
  VARIANT (1)..(16): Xaa = Any Amino Acid
CCELCCXNPAXXCTGC

SEQ ID NO: 5004 - protein, 17 aa, Artificial Sequence
  Synthetically generated peptide
  VARIANT (1)..(17): Xaa = Any Amino Acid
CCELCCXNPAXXXCTGC

SEQ ID NO: 5005 - protein, 17 aa, Artificial Sequence
  Synthetically generated peptide
  VARIANT (1)..(17): Xaa = Any Amino Acid
CCELCCXNPAXXCXTGC

SEQ ID NO: 5006 - protein, 17 aa, Artificial Sequence
  Synthetically generated peptide
  VARIANT (1)..(17): Xaa = Any Amino Acid
CCELCCXNPAXXCTXGC

SEQ ID NO: 5007 - protein, 17 aa, Artificial Sequence
  Synthetically generated peptide
  VARIANT (1)..(17): Xaa = Any Amino Acid
CCELCCXNPAXXCTGXC

SEQ ID NO: 5008 - protein, 16 aa, Artificial Sequence
  Synthetically generated peptide
  VARIANT (1)..(16): Xaa = Any Amino Acid
CCELCCXNPAXCXTGC

SEQ ID NO: 5009 - protein, 17 aa, Artificial Sequence
  Synthetically generated peptide
  VARIANT (1)..(17): Xaa = Any Amino Acid
CCELCCXNPAXCXXTGC

SEQ ID NO: 5010 - protein, 17 aa, Artificial Sequence
  Synthetically generated peptide
  VARIANT (1)..(17): Xaa = Any Amino Acid
CCELCCXNPAXCXTXGC

SEQ ID NO: 5011 - protein, 17 aa, Artificial Sequence
  Synthetically generated peptide
  VARIANT (1)..(17): Xaa = Any Amino Acid
CCELCCXNPAXCXTGXC

SEQ ID NO: 5012 - protein, 16 aa, Artificial Sequence
  Synthetically generated peptide
  VARIANT (1)..(16): Xaa = Any Amino Acid
CCELCCXNPAXCTXGC

SEQ ID NO: 5013 - protein, 17 aa, Artificial Sequence
  Synthetically generated peptide
  VARIANT (1)..(17): Xaa = Any Amino Acid
CCELCCXNPAXCTXXGC

SEQ ID NO: 5014 - protein, 17 aa, Artificial Sequence
  Synthetically generated peptide
  VARIANT (1)..(17): Xaa = Any Amino Acid
CCELCCXNPAXCTXGXC

SEQ ID NO: 5015 - protein, 16 aa, Artificial Sequence
  Synthetically generated peptide
  VARIANT (1)..(16): Xaa = Any Amino Acid
CCELCCXNPAXCTGXC

SEQ ID NO: 5016 - protein, 17 aa, Artificial Sequence
  Synthetically generated peptide
  VARIANT (1)..(17): Xaa = Any Amino Acid
CCELCCXNPAXCTGXXC

SEQ ID NO: 5017 - protein, 15 aa, Artificial Sequence
  Synthetically generated peptide
  VARIANT (1)..(15): Xaa = Any Amino Acid
CCELCCXNPACXTGC

SEQ ID NO: 5018 - protein, 16 aa, Artificial Sequence
  Synthetically generated peptide
  VARIANT (1)..(16): Xaa = Any Amino Acid
CCELCCXNPACXXTGC

SEQ ID NO: 5019 - protein, 17 aa, Artificial Sequence
  Synthetically generated peptide
  VARIANT (1)..(17): Xaa = Any Amino Acid
CCELCCXNPACXXXTGC

SEQ ID NO: 5020 - protein, 17 aa, Artificial Sequence
  Synthetically generated peptide
  VARIANT (1)..(17): Xaa = Any Amino Acid
CCELCCXNPACXXTXGC

SEQ ID NO: 5021 - protein, 17 aa, Artificial Sequence
  Synthetically generated peptide
  VARIANT (1)..(17): Xaa = Any Amino Acid
CCELCCXNPACXXTGXC

SEQ ID NO: 5022 - protein, 16 aa, Artificial Sequence
  Synthetically generated peptide
  VARIANT (1)..(16): Xaa = Any Amino Acid
CCELCCXNPACXTXGC

SEQ ID NO: 5023 - protein, 17 aa, Artificial Sequence
  Synthetically generated peptide
  VARIANT (1)..(17): Xaa = Any Amino Acid
CCELCCXNPACXTXXGC

SEQ ID NO: 5024 - protein, 17 aa, Artificial Sequence
  Synthetically generated peptide
  VARIANT (1)..(17): Xaa = Any Amino Acid
CCELCCXNPACXTXGXC

SEQ ID NO: 5025 - protein, 16 aa, Artificial Sequence
  Synthetically generated peptide
  VARIANT (1)..(16): Xaa = Any Amino Acid
CCELCCXNPACXTGXC

SEQ ID NO: 5026 - protein, 17 aa, Artificial Sequence
  Synthetically generated peptide
  VARIANT (1)..(17): Xaa = Any Amino Acid
CCELCCXNPACXTGXXC

SEQ ID NO: 5027 - protein, 15 aa, Artificial Sequence
  Synthetically generated peptide
  VARIANT (1)..(15): Xaa = Any Amino Acid
CCELCCXNPACTXGC

SEQ ID NO: 5028 - protein, 16 aa, Artificial Sequence
  Synthetically generated peptide
  VARIANT (1)..(16): Xaa = Any Amino Acid
CCELCCXNPACTXXGC

SEQ ID NO: 5029 - protein, 17 aa, Artificial Sequence
  Synthetically generated peptide
  VARIANT (1)..(17): Xaa = Any Amino Acid
CCELCCXNPACTXXXGC

SEQ ID NO: 5030 - protein, 17 aa, Artificial Sequence
  Synthetically generated peptide
  VARIANT (1)..(17): Xaa = Any Amino Acid
CCELCCXNPACTXXGXC

SEQ ID NO: 5031 - protein, 16 aa, Artificial Sequence
  Synthetically generated peptide
  VARIANT (1)..(16): Xaa = Any Amino Acid
CCELCCXNPACTXGXC

SEQ ID NO: 5032 - protein, 17 aa, Artificial Sequence
  Synthetically generated peptide
  VARIANT (1)..(17): Xaa = Any Amino Acid
CCELCCXNPACTXGXXC

SEQ ID NO: 5033 - protein, 15 aa, Artificial Sequence
  Synthetically generated peptide
  VARIANT (1)..(15): Xaa = Any Amino Acid
CCELCCXNPACTGXC

SEQ ID NO: 5034 - protein, 16 aa, Artificial Sequence
  Synthetically generated peptide
  VARIANT (1)..(16): Xaa = Any Amino Acid
CCELCCXNPACTGXXC

SEQ ID NO: 5035 - protein, 17 aa, Artificial Sequence
  Synthetically generated peptide
  VARIANT (1)..(17): Xaa = Any Amino Acid
CCELCCXNPACTGXXXC

SEQ ID NO: 5036 - protein, 14 aa, Artificial Sequence
  Synthetically generated peptide
  VARIANT (1)..(14): Xaa = Any Amino Acid
CCELCCNXPACTGC

SEQ ID NO: 5037 - protein, 15 aa, Artificial Sequence
  Synthetically generated peptide
  VARIANT (1)..(15): Xaa = Any Amino Acid
CCELCCNXXPACTGC

SEQ ID NO: 5038 - protein, 16 aa, Artificial Sequence
  Synthetically generated peptide
  VARIANT (1)..(16): Xaa = Any Amino Acid
CCELCCNXXXPACTGC

SEQ ID NO: 5039 - protein, 17 aa, Artificial Sequence
  Synthetically generated peptide
  VARIANT (1)..(17): Xaa = Any Amino Acid
CCELCCNXXXXPACTGC

SEQ ID NO: 5040 - protein, 17 aa, Artificial Sequence
  Synthetically generated peptide
  VARIANT (1)..(17): Xaa = Any Amino Acid
CCELCCNXXXPXACTGC

SEQ ID NO: 5041 - protein, 17 aa, Artificial Sequence
  Synthetically generated peptide
  VARIANT (1)..(17): Xaa = Any Amino Acid
CCELCCNXXXPAXCTGC

SEQ ID NO: 5042 - protein, 17 aa, Artificial Sequence
  Synthetically generated peptide
  VARIANT (1)..(17): Xaa = Any Amino Acid
CCELCCNXXXPACXTGC

SEQ ID NO: 5043 - protein, 17 aa, Artificial Sequence
  Synthetically generated peptide
  VARIANT (1)..(17): Xaa = Any Amino Acid
CCELCCNXXXPACTXGC

SEQ ID NO: 5044 - protein, 17 aa, Artificial Sequence
  Synthetically generated peptide
  VARIANT (1)..(17): Xaa = Any Amino Acid
CCELCCNXXXPACTGXC

SEQ ID NO: 5045 - protein, 16 aa, Artificial Sequence
  Synthetically generated peptide
  VARIANT (1)..(16): Xaa = Any Amino Acid
CCELCCNXXPXACTGC

SEQ ID NO: 5046 - protein, 17 aa, Artificial Sequence
  Synthetically generated peptide
  VARIANT (1)..(17): Xaa = Any Amino Acid
CCELCCNXXPXXACTGC

SEQ ID NO: 5047 - protein, 17 aa, Artificial Sequence
  Synthetically generated peptide
  VARIANT (1)..(17): Xaa = Any Amino Acid
CCELCCNXXPXAXCTGC

SEQ ID NO: 5048 - protein, 17 aa, Artificial Sequence
  Synthetically generated peptide
  VARIANT (1)..(17): Xaa = Any Amino Acid
CCELCCNXXPXACXTGC

SEQ ID NO: 5049 - protein, 17 aa, Artificial Sequence
  Synthetically generated peptide
  VARIANT (1)..(17): Xaa = Any Amino Acid
CCELCCNXXPXACTXGC

SEQ ID NO: 5050 - protein, 17 aa, Artificial Sequence
  Synthetically generated peptide
  VARIANT (1)..(17): Xaa = Any Amino Acid
CCELCCNXXPXACTGXC

SEQ ID NO: 5051 - protein, 16 aa, Artificial Sequence
  Synthetically generated peptide
  VARIANT (1)..(16): Xaa = Any Amino Acid
CCELCCNXXPAXCTGC

SEQ ID NO: 5052 - protein, 17 aa, Artificial Sequence
  Synthetically generated peptide
  VARIANT (1)..(17): Xaa = Any Amino Acid
CCELCCNXXPAXXCTGC

SEQ ID NO: 5053 - protein, 17 aa, Artificial Sequence
  Synthetically generated peptide
  VARIANT (1)..(17): Xaa = Any Amino Acid
CCELCCNXXPAXCXTGC

SEQ ID NO: 5054 - protein, 17 aa, Artificial Sequence
  Synthetically generated peptide
  VARIANT (1)..(17): Xaa = Any Amino Acid
CCELCCNXXPAXCTXGC

SEQ ID NO: 5055 - protein, 17 aa, Artificial Sequence
  Synthetically generated peptide
  VARIANT (1)..(17): Xaa = Any Amino Acid
CCELCCNXXPAXCTGXC

SEQ ID NO: 5056 - protein, 16 aa, Artificial Sequence
  Synthetically generated peptide
  VARIANT (1)..(16): Xaa = Any Amino Acid
CCELCCNXXPACXTGC

SEQ ID NO: 5057 - protein, 17 aa, Artificial Sequence
  Synthetically generated peptide
  VARIANT (1)..(17): Xaa = Any Amino Acid
CCELCCNXXPACXXTGC

SEQ ID NO: 5058 - protein, 17 aa, Artificial Sequence
  Synthetically generated peptide
  VARIANT (1)..(17): Xaa = Any Amino Acid
CCELCCNXXPACXTXGC

SEQ ID NO: 5059 - protein, 17 aa, Artificial Sequence
  Synthetically generated peptide
  VARIANT (1)..(17): Xaa = Any Amino Acid
CCELCCNXXPACXTGXC

SEQ ID NO: 5060 - protein, 16 aa, Artificial Sequence
  Synthetically generated peptide
  VARIANT (1)..(16): Xaa = Any Amino Acid
CCELCCNXXPACTXGC

SEQ ID NO: 5061 - protein, 17 aa, Artificial Sequence
  Synthetically generated peptide
  VARIANT (1)..(17): Xaa = Any Amino Acid
CCELCCNXXPACTXXGC

SEQ ID NO: 5062 - protein, 17 aa, Artificial Sequence
  Synthetically generated peptide
  VARIANT (1)..(17): Xaa = Any Amino Acid
CCELCCNXXPACTXGXC

SEQ ID NO: 5063 - protein, 16 aa, Artificial Sequence
  Synthetically generated peptide
  VARIANT (1)..(16): Xaa = Any Amino Acid
CCELCCNXXPACTGXC

SEQ ID NO: 5064 - protein, 17 aa, Artificial Sequence
  Synthetically generated peptide
  VARIANT (1)..(17): Xaa = Any Amino Acid
CCELCCNXXPACTGXXC

SEQ ID NO: 5065 - protein, 15 aa, Artificial Sequence
  Synthetically generated peptide
  VARIANT (1)..(15): Xaa = Any Amino Acid
CCELCCNXPXACTGC

SEQ ID NO: 5066 - protein, 16 aa, Artificial Sequence
  Synthetically generated peptide
  VARIANT (1)..(16): Xaa = Any Amino Acid
CCELCCNXPXXACTGC

SEQ ID NO: 5067 - protein, 17 aa, Artificial Sequence
  Synthetically generated peptide
  VARIANT (1)..(17): Xaa = Any Amino Acid
CCELCCNXPXXXACTGC

SEQ ID NO: 5068 - protein, 17 aa, Artificial Sequence
  Synthetically generated peptide
  VARIANT (1)..(17): Xaa = Any Amino Acid
CCELCCNXPXXAXCTGC

SEQ ID NO: 5069 - protein, 17 aa, Artificial Sequence
  Synthetically generated peptide
  VARIANT (1)..(17): Xaa = Any Amino Acid
CCELCCNXPXXACXTGC

SEQ ID NO: 5070 - protein, 17 aa, Artificial Sequence
  Synthetically generated peptide
  VARIANT (1)..(17): Xaa = Any Amino Acid
CCELCCNXPXXACTXGC

SEQ ID NO: 5071 - protein, 17 aa, Artificial Sequence
  Synthetically generated peptide
  VARIANT (1)..(17): Xaa = Any Amino Acid
CCELCCNXPXXACTGXC

SEQ ID NO: 5072 - protein, 16 aa, Artificial Sequence
  Synthetically generated peptide
  VARIANT (1)..(16): Xaa = Any Amino Acid
CCELCCNXPXAXCTGC

SEQ ID NO: 5073 - protein, 17 aa, Artificial Sequence
  Synthetically generated peptide
  VARIANT (1)..(17): Xaa = Any Amino Acid
CCELCCNXPXAXXCTGC

SEQ ID NO: 5074 - protein, 17 aa, Artificial Sequence
  Synthetically generated peptide
  VARIANT (1)..(17): Xaa = Any Amino Acid
CCELCCNXPXAXCXTGC

SEQ ID NO: 5075 - protein, 17 aa, Artificial Sequence
  Synthetically generated peptide
  VARIANT (1)..(17): Xaa = Any Amino Acid
CCELCCNXPXAXCTXGC

SEQ ID NO: 5076 - protein, 17 aa, Artificial Sequence
  Synthetically generated peptide
  VARIANT (1)..(17): Xaa = Any Amino Acid
CCELCCNXPXAXCTGXC

SEQ ID NO: 5077 - protein, 16 aa, Artificial Sequence
  Synthetically generated peptide
  VARIANT (1)..(16): Xaa = Any Amino Acid
CCELCCNXPXACXTGC

SEQ ID NO: 5078 - protein, 17 aa, Artificial Sequence
  Synthetically generated peptide
  VARIANT (1)..(17): Xaa = Any Amino Acid
CCELCCNXPXACXXTGC

SEQ ID NO: 5079 - protein, 17 aa, Artificial Sequence
  Synthetically generated peptide
  VARIANT (1)..(17): Xaa = Any Amino Acid
CCELCCNXPXACXTXGC

SEQ ID NO: 5080 - protein, 17 aa, Artificial Sequence
  Synthetically generated peptide
  VARIANT (1)..(17): Xaa = Any Amino Acid
CCELCCNXPXACXTGXC

SEQ ID NO: 5081 - protein, 16 aa, Artificial Sequence
  Synthetically generated peptide
  VARIANT (1)..(16): Xaa = Any Amino Acid
CCELCCNXPXACTXGC

SEQ ID NO: 5082 - protein, 17 aa, Artificial Sequence
  Synthetically generated peptide
  VARIANT (1)..(17): Xaa = Any Amino Acid
CCELCCNXPXACTXXGC

SEQ ID NO: 5083 - protein, 17 aa, Artificial Sequence
  Synthetically generated peptide
  VARIANT (1)..(17): Xaa = Any Amino Acid
CCELCCNXPXACTXGXC

SEQ ID NO: 5084 - protein, 16 aa, Artificial Sequence
  Synthetically generated peptide
  VARIANT (1)..(16): Xaa = Any Amino Acid
CCELCCNXPXACTGXC

SEQ ID NO: 5085 - protein, 17 aa, Artificial Sequence
  Synthetically generated peptide
  VARIANT (1)..(17): Xaa = Any Amino Acid
CCELCCNXPXACTGXXC

SEQ ID NO: 5086 - protein, 15 aa, Artificial Sequence
  Synthetically generated peptide
  VARIANT (1)..(15): Xaa = Any Amino Acid
CCELCCNXPAXCTGC

SEQ ID NO: 5087 - protein, 16 aa, Artificial Sequence
  Synthetically generated peptide
  VARIANT (1)..(16): Xaa = Any Amino Acid
CCELCCNXPAXXCTGC

SEQ ID NO: 5088 - protein, 17 aa, Artificial Sequence
  Synthetically generated peptide
  VARIANT (1)..(17): Xaa = Any Amino Acid
CCELCCNXPAXXXCTGC

SEQ ID NO: 5089 - protein, 17 aa, Artificial Sequence
  Synthetically generated peptide
  VARIANT (1)..(17): Xaa = Any Amino Acid
CCELCCNXPAXXCXTGC

SEQ ID NO: 5090 - protein, 17 aa, Artificial Sequence
  Synthetically generated peptide
  VARIANT (1)..(17): Xaa = Any Amino Acid
CCELCCNXPAXXCTXGC

SEQ ID NO: 5091 - protein, 17 aa, Artificial Sequence
  Synthetically generated peptide
  VARIANT (1)..(17): Xaa = Any Amino Acid
CCELCCNXPAXXCTGXC

SEQ ID NO: 5092 - protein, 16 aa, Artificial Sequence
  Synthetically generated peptide
  VARIANT (1)..(16): Xaa = Any Amino Acid
CCELCCNXPAXCXTGC

SEQ ID NO: 5093 - protein, 17 aa, Artificial Sequence
  Synthetically generated peptide
  VARIANT (1)..(17): Xaa = Any Amino Acid
CCELCCNXPAXCXXTGC

SEQ ID NO: 5094 - protein, 17 aa, Artificial Sequence
  Synthetically generated peptide
  VARIANT (1)..(17): Xaa = Any Amino Acid
CCELCCNXPAXCXTXGC

SEQ ID NO: 5095 - protein, 17 aa, Artificial Sequence
  Synthetically generated peptide
  VARIANT (1)..(17): Xaa = Any Amino Acid
CCELCCNXPAXCXTGXC

SEQ ID NO: 5096 - protein, 16 aa, Artificial Sequence
  Synthetically generated peptide
  VARIANT (1)..(16): Xaa = Any Amino Acid
CCELCCNXPAXCTXGC

SEQ ID NO: 5097 - protein, 17 aa, Artificial Sequence
  Synthetically generated peptide
  VARIANT (1)..(17): Xaa = Any Amino Acid
CCELCCNXPAXCTXXGC

SEQ ID NO: 5098 - protein, 17 aa, Artificial Sequence
  Synthetically generated peptide
  VARIANT (1)..(17): Xaa = Any Amino Acid
CCELCCNXPAXCTXGXC

SEQ ID NO: 5099 - protein, 16 aa, Artificial Sequence
  Synthetically generated peptide
  VARIANT (1)..(16): Xaa = Any Amino Acid
CCELCCNXPAXCTGXC

SEQ ID NO: 5100 - protein, 17 aa, Artificial Sequence
  Synthetically generated peptide
  VARIANT (1)..(17): Xaa = Any Amino Acid
CCELCCNXPAXCTGXXC

SEQ ID NO: 5101 - protein, 15 aa, Artificial Sequence
  Synthetically generated peptide
  VARIANT (1)..(15): Xaa = Any Amino Acid
CCELCCNXPACXTGC

SEQ ID NO: 5102 - protein, 16 aa, Artificial Sequence
  Synthetically generated peptide
  VARIANT (1)..(16): Xaa = Any Amino Acid
CCELCCNXPACXXTGC

SEQ ID NO: 5103 - protein, 17 aa, Artificial Sequence
  Synthetically generated peptide
  VARIANT (1)..(17): Xaa = Any Amino Acid
CCELCCNXPACXXXTGC

SEQ ID NO: 5104 - protein, 17 aa, Artificial Sequence
  Synthetically generated peptide
  VARIANT (1)..(17): Xaa = Any Amino Acid
CCELCCNXPACXXTXGC

SEQ ID NO: 5105 - protein, 17 aa, Artificial Sequence
  Synthetically generated peptide
  VARIANT (1)..(17): Xaa = Any Amino Acid
CCELCCNXPACXXTGXC

SEQ ID NO: 5106 - protein, 16 aa, Artificial Sequence
  Synthetically generated peptide
  VARIANT (1)..(16): Xaa = Any Amino Acid
CCELCCNXPACXTXGC

SEQ ID NO: 5107 - protein, 17 aa, Artificial Sequence
  Synthetically generated peptide
  VARIANT (1)..(17): Xaa = Any Amino Acid
CCELCCNXPACXTXXGC

SEQ ID NO: 5108 - protein, 17 aa, Artificial Sequence
  Synthetically generated peptide
  VARIANT (1)..(17): Xaa = Any Amino Acid
CCELCCNXPACXTXGXC

SEQ ID NO: 5109 - protein, 16 aa, Artificial Sequence
  Synthetically generated peptide
  VARIANT (1)..(16): Xaa = Any Amino Acid
CCELCCNXPACXTGXC

SEQ ID NO: 5110 - protein, 17 aa, Artificial Sequence
  Synthetically generated peptide
  VARIANT (1)..(17): Xaa = Any Amino Acid
CCELCCNXPACXTGXXC

SEQ ID NO: 5111 - protein, 15 aa, Artificial Sequence
  Synthetically generated peptide
  VARIANT (1)..(15): Xaa = Any Amino Acid
CCELCCNXPACTXGC

SEQ ID NO: 5112 - protein, 16 aa, Artificial Sequence
  Synthetically generated peptide
  VARIANT (1)..(16): Xaa = Any Amino Acid
CCELCCNXPACTXXGC

SEQ ID NO: 5113 - protein, 17 aa, Artificial Sequence
  Synthetically generated peptide
  VARIANT (1)..(17): Xaa = Any Amino Acid
CCELCCNXPACTXXXGC

SEQ ID NO: 5114 - protein, 17 aa, Artificial Sequence
  Synthetically generated peptide
  VARIANT (1)..(17): Xaa = Any Amino Acid
CCELCCNXPACTXXGXC

SEQ ID NO: 5115 - protein, 16 aa, Artificial Sequence
  Synthetically generated peptide
  VARIANT (1)..(16): Xaa = Any Amino Acid
CCELCCNXPACTXGXC

SEQ ID NO: 5116 - protein, 17 aa, Artificial Sequence
  Synthetically generated peptide
  VARIANT (1)..(17): Xaa = Any Amino Acid
CCELCCNXPACTXGXXC

SEQ ID NO: 5117 - protein, 15 aa, Artificial Sequence
  Synthetically generated peptide
  VARIANT (1)..(15): Xaa = Any Amino Acid
CCELCCNXPACTGXC

SEQ ID NO: 5118 - protein, 16 aa, Artificial Sequence
  Synthetically generated peptide
  VARIANT (1)..(16): Xaa = Any Amino Acid
CCELCCNXPACTGXXC

SEQ ID NO: 5119 - protein, 17 aa, Artificial Sequence
  Synthetically generated peptide
  VARIANT (1)..(17): Xaa = Any Amino Acid
CCELCCNXPACTGXXXC

SEQ ID NO: 5120 - protein, 14 aa, Artificial Sequence
  Synthetically generated peptide
  VARIANT (1)..(14): Xaa = Any Amino Acid
CCELCCNPXACTGC

SEQ ID NO: 5121 - protein, 15 aa, Artificial Sequence
  Synthetically generated peptide
  VARIANT (1)..(15): Xaa = Any Amino Acid
CCELCCNPXXACTGC

SEQ ID NO: 5122 - protein, 16 aa, Artificial Sequence
  Synthetically generated peptide
  VARIANT (1)..(16): Xaa = Any Amino Acid
CCELCCNPXXXACTGC

SEQ ID NO: 5123 - protein, 17 aa, Artificial Sequence
  Synthetically generated peptide
  VARIANT (1)..(17): Xaa = Any Amino Acid
CCELCCNPXXXXACTGC

SEQ ID NO: 5124 - protein, 17 aa, Artificial Sequence
  Synthetically generated peptide
  VARIANT (1)..(17): Xaa = Any Amino Acid
CCELCCNPXXXAXCTGC

SEQ ID NO: 5125 - protein, 17 aa, Artificial Sequence
  Synthetically generated peptide
  VARIANT (1)..(17): Xaa = Any Amino Acid
CCELCCNPXXXACXTGC

SEQ ID NO: 5126 - protein, 17 aa, Artificial Sequence
  Synthetically generated peptide
  VARIANT (1)..(17): Xaa = Any Amino Acid
CCELCCNPXXXACTXGC

SEQ ID NO: 5127 - protein, 17 aa, Artificial Sequence
  Synthetically generated peptide
  VARIANT (1)..(17): Xaa = Any Amino Acid
CCELCCNPXXXACTGXC

SEQ ID NO: 5128 - protein, 16 aa, Artificial Sequence
  Synthetically generated peptide
  VARIANT (1)..(16): Xaa = Any Amino Acid
CCELCCNPXXAXCTGC

SEQ ID NO: 5129 - protein, 17 aa, Artificial Sequence
  Synthetically generated peptide
  VARIANT (1)..(17): Xaa = Any Amino Acid
CCELCCNPXXAXXCTGC

SEQ ID NO: 5130 - protein, 17 aa, Artificial Sequence
  Synthetically generated peptide
  VARIANT (1)..(17): Xaa = Any Amino Acid
CCELCCNPXXAXCXTGC

SEQ ID NO: 5131 - protein, 17 aa, Artificial Sequence
  Synthetically generated peptide
  VARIANT (1)..(17): Xaa = Any Amino Acid
CCELCCNPXXAXCTXGC

SEQ ID NO: 5132 - protein, 17 aa, Artificial Sequence
  Synthetically generated peptide
  VARIANT (1)..(17): Xaa = Any Amino Acid
CCELCCNPXXAXCTGXC

SEQ ID NO: 5133 - protein, 16 aa, Artificial Sequence
  Synthetically generated peptide
  VARIANT (1)..(16): Xaa = Any Amino Acid
CCELCCNPXXACXTGC

SEQ ID NO: 5134 - protein, 17 aa, Artificial Sequence
  Synthetically generated peptide
  VARIANT (1)..(17): Xaa = Any Amino Acid
CCELCCNPXXACXXTGC

SEQ ID NO: 5135 - protein, 17 aa, Artificial Sequence
  Synthetically generated peptide
  VARIANT (1)..(17): Xaa = Any Amino Acid
CCELCCNPXXACXTXGC

SEQ ID NO: 5136 - protein, 17 aa, Artificial Sequence
  Synthetically generated peptide
  VARIANT (1)..(17): Xaa = Any Amino Acid
CCELCCNPXXACXTGXC

SEQ ID NO: 5137 - protein, 16 aa, Artificial Sequence
  Synthetically generated peptide
  VARIANT (1)..(16): Xaa = Any Amino Acid
CCELCCNPXXACTXGC

SEQ ID NO: 5138 - protein, 17 aa, Artificial Sequence
  Synthetically generated peptide
  VARIANT (1)..(17): Xaa = Any Amino Acid
CCELCCNPXXACTXXGC

SEQ ID NO: 5139 - protein, 17 aa, Artificial Sequence
  Synthetically generated peptide
  VARIANT (1)..(17): Xaa = Any Amino Acid
CCELCCNPXXACTXGXC

SEQ ID NO: 5140 - protein, 16 aa, Artificial Sequence
  Synthetically generated peptide
  VARIANT (1)..(16): Xaa = Any Amino Acid
CCELCCNPXXACTGXC

SEQ ID NO: 5141 - protein, 17 aa, Artificial Sequence
  Synthetically generated peptide
  VARIANT (1)..(17): Xaa = Any Amino Acid
CCELCCNPXXACTGXXC

SEQ ID NO: 5142 - protein, 15 aa, Artificial Sequence
  Synthetically generated peptide
  VARIANT (1)..(15): Xaa = Any Amino Acid
CCELCCNPXAXCTGC

SEQ ID NO: 5143 - protein, 16 aa, Artificial Sequence
  Synthetically generated peptide
  VARIANT (1)..(16): Xaa = Any Amino Acid
CCELCCNPXAXXCTGC

SEQ ID NO: 5144 - protein, 17 aa, Artificial Sequence
  Synthetically generated peptide
  VARIANT (1)..(17): Xaa = Any Amino Acid
CCELCCNPXAXXXCTGC

SEQ ID NO: 5145 - protein, 17 aa, Artificial Sequence
  Synthetically generated peptide
  VARIANT (1)..(17): Xaa = Any Amino Acid
CCELCCNPXAXXCXTGC

SEQ ID NO: 5146 - protein, 17 aa, Artificial Sequence
  Synthetically generated peptide
  VARIANT (1)..(17): Xaa = Any Amino Acid
CCELCCNPXAXXCTXGC

SEQ ID NO: 5147 - protein, 17 aa, Artificial Sequence
  Synthetically generated peptide
  VARIANT (1)..(17): Xaa = Any Amino Acid
CCELCCNPXAXXCTGXC

SEQ ID NO: 5148 - protein, 16 aa, Artificial Sequence
  Synthetically generated peptide
  VARIANT (1)..(16): Xaa = Any Amino Acid
CCELCCNPXAXCXTGC

SEQ ID NO: 5149 - protein, 17 aa, Artificial Sequence
  Synthetically generated peptide
  VARIANT (1)..(17): Xaa = Any Amino Acid
CCELCCNPXAXCXXTGC

SEQ ID NO: 5150 - protein, 17 aa, Artificial Sequence
  Synthetically generated peptide
  VARIANT (1)..(17): Xaa = Any Amino Acid
CCELCCNPXAXCXTXGC

SEQ ID NO: 5151 - protein, 17 aa, Artificial Sequence
  Synthetically generated peptide
  VARIANT (1)..(17): Xaa = Any Amino Acid
CCELCCNPXAXCXTGXC

SEQ ID NO: 5152 - protein, 16 aa, Artificial Sequence
  Synthetically generated peptide
  VARIANT (1)..(16): Xaa = Any Amino Acid
CCELCCNPXAXCTXGC

SEQ ID NO: 5153 - protein, 17 aa, Artificial Sequence
  Synthetically generated peptide
  VARIANT (1)..(17): Xaa = Any Amino Acid
CCELCCNPXAXCTXXGC

SEQ ID NO: 5154 - protein, 17 aa, Artificial Sequence
  Synthetically generated peptide
  VARIANT (1)..(17): Xaa = Any Amino Acid
CCELCCNPXAXCTXGXC

SEQ ID NO: 5155 - protein, 16 aa, Artificial Sequence
  Synthetically generated peptide
  VARIANT (1)..(16): Xaa = Any Amino Acid
CCELCCNPXAXCTGXC

SEQ ID NO: 5156 - protein, 17 aa, Artificial Sequence
  Synthetically generated peptide
  VARIANT (1)..(17): Xaa = Any Amino Acid
CCELCCNPXAXCTGXXC

SEQ ID NO: 5157 - protein, 15 aa, Artificial Sequence
  Synthetically generated peptide
  VARIANT (1)..(15): Xaa = Any Amino Acid
CCELCCNPXACXTGC

SEQ ID NO: 5158 - protein, 16 aa, Artificial Sequence
  Synthetically generated peptide
  VARIANT (1)..(16): Xaa = Any Amino Acid
CCELCCNPXACXXTGC

SEQ ID NO: 5159 - protein, 17 aa, Artificial Sequence
  Synthetically generated peptide
  VARIANT (1)..(17): Xaa = Any Amino Acid
CCELCCNPXACXXXTGC

SEQ ID NO: 5160 - protein, 17 aa, Artificial Sequence
  Synthetically generated peptide
  VARIANT (1)..(17): Xaa = Any Amino Acid
CCELCCNPXACXXTXGC

SEQ ID NO: 5161 - protein, 17 aa, Artificial Sequence
  Synthetically generated peptide
  VARIANT (1)..(17): Xaa = Any Amino Acid
CCELCCNPXACXXTGXC

SEQ ID NO: 5162 - protein, 16 aa, Artificial Sequence
  Synthetically generated peptide
  VARIANT (1)..(16): Xaa = Any Amino Acid
CCELCCNPXACXTXGC

SEQ ID NO: 5163 - protein, 17 aa, Artificial Sequence
  Synthetically generated peptide
  VARIANT (1)..(17): Xaa = Any Amino Acid
CCELCCNPXACXTXXGC

SEQ ID NO: 5164 - protein, 17 aa, Artificial Sequence
  Synthetically generated peptide
  VARIANT (1)..(17): Xaa = Any Amino Acid
CCELCCNPXACXTXGXC

SEQ ID NO: 5165 - protein, 16 aa, Artificial Sequence
  Synthetically generated peptide
  VARIANT (1)..(16): Xaa = Any Amino Acid
CCELCCNPXACXTGXC

SEQ ID NO: 5166 - protein, 17 aa, Artificial Sequence
  Synthetically generated peptide
  VARIANT (1)..(17): Xaa = Any Amino Acid
CCELCCNPXACXTGXXC

SEQ ID NO: 5167 - protein, 15 aa, Artificial Sequence
  Synthetically generated peptide
  VARIANT (1)..(15): Xaa = Any Amino Acid
CCELCCNPXACTXGC

SEQ ID NO: 5168 - protein, 16 aa, Artificial Sequence
  Synthetically generated peptide
  VARIANT (1)..(16): Xaa = Any Amino Acid
CCELCCNPXACTXXGC

SEQ ID NO: 5169 - protein, 17 aa, Artificial Sequence
  Synthetically generated peptide
  VARIANT (1)..(17): Xaa = Any Amino Acid
CCELCCNPXACTXXXGC

SEQ ID NO: 5170 - protein, 17 aa, Artificial Sequence
  Synthetically generated peptide
  VARIANT (1)..(17): Xaa = Any Amino Acid
CCELCCNPXACTXXGXC

SEQ ID NO: 5171 - protein, 16 aa, Artificial Sequence
  Synthetically generated peptide
  VARIANT (1)..(16): Xaa = Any Amino Acid
CCELCCNPXACTXGXC

SEQ ID NO: 5172 - protein, 17 aa, Artificial Sequence
  Synthetically generated peptide
  VARIANT (1)..(17): Xaa = Any Amino Acid
CCELCCNPXACTXGXXC

SEQ ID NO: 5173 - protein, 15 aa, Artificial Sequence
  Synthetically generated peptide
  VARIANT (1)..(15): Xaa = Any Amino Acid
CCELCCNPXACTGXC

SEQ ID NO: 5174 - protein, 16 aa, Artificial Sequence
  Synthetically generated peptide
  VARIANT (1)..(16): Xaa = Any Amino Acid
CCELCCNPXACTGXXC

SEQ ID NO: 5175 - protein, 17 aa, Artificial Sequence
  Synthetically generated peptide
  VARIANT (1)..(17): Xaa = Any Amino Acid
CCELCCNPXACTGXXXC

SEQ ID NO: 5176 - protein, 14 aa, Artificial Sequence
  Synthetically generated peptide
  VARIANT (1)..(14): Xaa = Any Amino Acid
CCELCCNPAXCTGC

SEQ ID NO: 5177 - protein, 15 aa, Artificial Sequence
  Synthetically generated peptide
  VARIANT (1)..(15): Xaa = Any Amino Acid
CCELCCNPAXXCTGC

SEQ ID NO: 5178 - protein, 16 aa, Artificial Sequence
  Synthetically generated peptide
  VARIANT (1)..(16): Xaa = Any Amino Acid
CCELCCNPAXXXCTGC

SEQ ID NO: 5179 - protein, 17 aa, Artificial Sequence
  Synthetically generated peptide
  VARIANT (1)..(17): Xaa = Any Amino Acid
CCELCCNPAXXXXCTGC

SEQ ID NO: 5180 - protein, 17 aa, Artificial Sequence
  Synthetically generated peptide
  VARIANT (1)..(17): Xaa = Any Amino Acid
CCELCCNPAXXXCXTGC

SEQ ID NO: 5181 - protein, 17 aa, Artificial Sequence
  Synthetically generated peptide
  VARIANT (1)..(17): Xaa = Any Amino Acid
CCELCCNPAXXXCTXGC

SEQ ID NO: 5182 - protein, 17 aa, Artificial Sequence
  Synthetically generated peptide
  VARIANT (1)..(17): Xaa = Any Amino Acid
CCELCCNPAXXXCTGXC

SEQ ID NO: 5183 - protein, 16 aa, Artificial Sequence
  Synthetically generated peptide
  VARIANT (1)..(16): Xaa = Any Amino Acid
CCELCCNPAXXCXTGC

SEQ ID NO: 5184 - protein, 17 aa, Artificial Sequence
  Synthetically generated peptide
  VARIANT (1)..(17): Xaa = Any Amino Acid
CCELCCNPAXXCXXTGC

SEQ ID NO: 5185 - protein, 17 aa, Artificial Sequence
  Synthetically generated peptide
  VARIANT (1)..(17): Xaa = Any Amino Acid
CCELCCNPAXXCXTXGC

SEQ ID NO: 5186 - protein, 17 aa, Artificial Sequence
  Synthetically generated peptide
  VARIANT (1)..(17): Xaa = Any Amino Acid
CCELCCNPAXXCXTGXC

SEQ ID NO: 5187 - protein, 16 aa, Artificial Sequence
  Synthetically generated peptide
  VARIANT (1)..(16): Xaa = Any Amino Acid
CCELCCNPAXXCTXGC

SEQ ID NO: 5188 - protein, 17 aa, Artificial Sequence
  Synthetically generated peptide
  VARIANT (1)..(17): Xaa = Any Amino Acid
CCELCCNPAXXCTXXGC

SEQ ID NO: 5189 - protein, 17 aa, Artificial Sequence
  Synthetically generated peptide
  VARIANT (1)..(17): Xaa = Any Amino Acid
CCELCCNPAXXCTXGXC

SEQ ID NO: 5190 - protein, 16 aa, Artificial Sequence
  Synthetically generated peptide
  VARIANT (1)..(16): Xaa = Any Amino Acid
CCELCCNPAXXCTGXC

SEQ ID NO: 5191 - protein, 17 aa, Artificial Sequence
  Synthetically generated peptide
  VARIANT (1)..(17): Xaa = Any Amino Acid
CCELCCNPAXXCTGXXC

SEQ ID NO: 5192 - protein, 15 aa, Artificial Sequence
  Synthetically generated peptide
  VARIANT (1)..(15): Xaa = Any Amino Acid
CCELCCNPAXCXTGC

SEQ ID NO: 5193 - protein, 16 aa, Artificial Sequence
  Synthetically generated peptide
  VARIANT (1)..(16): Xaa = Any Amino Acid
CCELCCNPAXCXXTGC

SEQ ID NO: 5194 - protein, 17 aa, Artificial Sequence
  Synthetically generated peptide
  VARIANT (1)..(17): Xaa = Any Amino Acid
CCELCCNPAXCXXXTGC

SEQ ID NO: 5195 - protein, 17 aa, Artificial Sequence
  Synthetically generated peptide
  VARIANT (1)..(17): Xaa = Any Amino Acid
CCELCCNPAXCXXTXGC

SEQ ID NO: 5196 - protein, 17 aa, Artificial Sequence
  Synthetically generated peptide
  VARIANT (1)..(17): Xaa = Any Amino Acid
CCELCCNPAXCXXTGXC

SEQ ID NO: 5197 - protein, 16 aa, Artificial Sequence
  Synthetically generated peptide
  VARIANT (1)..(16): Xaa = Any Amino Acid
CCELCCNPAXCXTXGC

SEQ ID NO: 5198 - protein, 17 aa, Artificial Sequence
  Synthetically generated peptide
  VARIANT (1)..(17): Xaa = Any Amino Acid
CCELCCNPAXCXTXXGC

SEQ ID NO: 5199 - protein, 17 aa, Artificial Sequence
  Synthetically generated peptide
  VARIANT (1)..(17): Xaa = Any Amino Acid
CCELCCNPAXCXTXGXC

SEQ ID NO: 5200 - protein, 16 aa, Artificial Sequence
  Synthetically generated peptide
  VARIANT (1)..(16): Xaa = Any Amino Acid
CCELCCNPAXCXTGXC

SEQ ID NO: 5201 - protein, 17 aa, Artificial Sequence
  Synthetically generated peptide
  VARIANT (1)..(17): Xaa = Any Amino Acid
CCELCCNPAXCXTGXXC

SEQ ID NO: 5202 - protein, 15 aa, Artificial Sequence
  Synthetically generated peptide
  VARIANT (1)..(15): Xaa = Any Amino Acid
CCELCCNPAXCTXGC

SEQ ID NO: 5203 - protein, 16 aa, Artificial Sequence
  Synthetically generated peptide
  VARIANT (1)..(16): Xaa = Any Amino Acid
CCELCCNPAXCTXXGC

SEQ ID NO: 5204 - protein, 17 aa, Artificial Sequence
  Synthetically generated peptide
  VARIANT (1)..(17): Xaa = Any Amino Acid
CCELCCNPAXCTXXXGC

SEQ ID NO: 5205 - protein, 17 aa, Artificial Sequence
  Synthetically generated peptide
  VARIANT (1)..(17): Xaa = Any Amino Acid
CCELCCNPAXCTXXGXC

SEQ ID NO: 5206 - protein, 16 aa, Artificial Sequence
  Synthetically generated peptide
  VARIANT (1)..(16): Xaa = Any Amino Acid
CCELCCNPAXCTXGXC

SEQ ID NO: 5207 - protein, 17 aa, Artificial Sequence
  Synthetically generated peptide
  VARIANT (1)..(17): Xaa = Any Amino Acid
CCELCCNPAXCTXGXXC

SEQ ID NO: 5208 - protein, 15 aa, Artificial Sequence
  Synthetically generated peptide
  VARIANT (1)..(15): Xaa = Any Amino Acid
CCELCCNPAXCTGXC

SEQ ID NO: 5209 - protein, 16 aa, Artificial Sequence
  Synthetically generated peptide
  VARIANT (1)..(16): Xaa = Any Amino Acid
CCELCCNPAXCTGXXC

SEQ ID NO: 5210 - protein, 17 aa, Artificial Sequence
  Synthetically generated peptide
  VARIANT (1)..(17): Xaa = Any Amino Acid
CCELCCNPAXCTGXXXC

SEQ ID NO: 5211 - protein, 14 aa, Artificial Sequence
  Synthetically generated peptide
  VARIANT (1)..(14): Xaa = Any Amino Acid
CCELCCNPACXTGC

SEQ ID NO: 5212 - protein, 15 aa, Artificial Sequence
  Synthetically generated peptide
  VARIANT (1)..(15): Xaa = Any Amino Acid
CCELCCNPACXXTGC

SEQ ID NO: 5213 - protein, 16 aa, Artificial Sequence
  Synthetically generated peptide
  VARIANT (1)..(16): Xaa = Any Amino Acid
CCELCCNPACXXXTGC

SEQ ID NO: 5214 - protein, 17 aa, Artificial Sequence
  Synthetically generated peptide
  VARIANT (1)..(17): Xaa = Any Amino Acid
CCELCCNPACXXXXTGC

SEQ ID NO: 5215 - protein, 17 aa, Artificial Sequence
  Synthetically generated peptide
  VARIANT (1)..(17): Xaa = Any Amino Acid
CCELCCNPACXXXTXGC

SEQ ID NO: 5216 - protein, 17 aa, Artificial Sequence
  Synthetically generated peptide
  VARIANT (1)..(17): Xaa = Any Amino Acid
CCELCCNPACXXXTGXC

SEQ ID NO: 5217 - protein, 16 aa, Artificial Sequence
  Synthetically generated peptide
  VARIANT (1)..(16): Xaa = Any Amino Acid
CCELCCNPACXXTXGC

SEQ ID NO: 5218 - protein, 17 aa, Artificial Sequence
  Synthetically generated peptide
  VARIANT (1)..(17): Xaa = Any Amino Acid
CCELCCNPACXXTXXGC

SEQ ID NO: 5219 - protein, 17 aa, Artificial Sequence
  Synthetically generated peptide
  VARIANT (1)..(17): Xaa = Any Amino Acid
CCELCCNPACXXTXGXC

SEQ ID NO: 5220 - protein, 16 aa, Artificial Sequence
  Synthetically generated peptide
  VARIANT (1)..(16): Xaa = Any Amino Acid
CCELCCNPACXXTGXC

SEQ ID NO: 5221 - protein, 17 aa, Artificial Sequence
  Synthetically generated peptide
  VARIANT (1)..(17): Xaa = Any Amino Acid
CCELCCNPACXXTGXXC

SEQ ID NO: 5222 - protein, 15 aa, Artificial Sequence
  Synthetically generated peptide
  VARIANT (1)..(15): Xaa = Any Amino Acid
CCELCCNPACXTXGC

SEQ ID NO: 5223 - protein, 16 aa, Artificial Sequence
  Synthetically generated peptide
  VARIANT (1)..(16): Xaa = Any Amino Acid
CCELCCNPACXTXXGC

SEQ ID NO: 5224 - protein, 17 aa, Artificial Sequence
  Synthetically generated peptide
  VARIANT (1)..(17): Xaa = Any Amino Acid
CCELCCNPACXTXXXGC

SEQ ID NO: 5225 - protein, 17 aa, Artificial Sequence
  Synthetically generated peptide
  VARIANT (1)..(17): Xaa = Any Amino Acid
CCELCCNPACXTXXGXC

SEQ ID NO: 5226 - protein, 16 aa, Artificial Sequence
  Synthetically generated peptide
  VARIANT (1)..(16): Xaa = Any Amino Acid
CCELCCNPACXTXGXC

SEQ ID NO: 5227 - protein, 17 aa, Artificial Sequence
  Synthetically generated peptide
  VARIANT (1)..(17): Xaa = Any Amino Acid
CCELCCNPACXTXGXXC

SEQ ID NO: 5228 - protein, 15 aa, Artificial Sequence
  Synthetically generated peptide
  VARIANT (1)..(15): Xaa = Any Amino Acid
CCELCCNPACXTGXC

SEQ ID NO: 5229 - protein, 16 aa, Artificial Sequence
  Synthetically generated peptide
  VARIANT (1)..(16): Xaa = Any Amino Acid
CCELCCNPACXTGXXC

SEQ ID NO: 5230 - protein, 17 aa, Artificial Sequence
  Synthetically generated peptide
  VARIANT (1)..(17): Xaa = Any Amino Acid
CCELCCNPACXTGXXXC

SEQ ID NO: 5231 - protein, 14 aa, Artificial Sequence
  Synthetically generated peptide
  VARIANT (1)..(14): Xaa = Any Amino Acid
CCELCCNPACTXGC

SEQ ID NO: 5232 - protein, 15 aa, Artificial Sequence
  Synthetically generated peptide
  VARIANT (1)..(15): Xaa = Any Amino Acid
CCELCCNPACTXXGC

SEQ ID NO: 5233 - protein, 16 aa, Artificial Sequence
  Synthetically generated peptide
  VARIANT (1)..(16): Xaa = Any Amino Acid
CCELCCNPACTXXXGC

SEQ ID NO: 5234 - protein, 17 aa, Artificial Sequence
  Synthetically generated peptide
  VARIANT (1)..(17): Xaa = Any Amino Acid
CCELCCNPACTXXXXGC

SEQ ID NO: 5235 - protein, 17 aa, Artificial Sequence
  Synthetically generated peptide
  VARIANT (1)..(17): Xaa = Any Amino Acid
CCELCCNPACTXXXGXC

SEQ ID NO: 5236 - protein, 16 aa, Artificial Sequence
  Synthetically generated peptide
  VARIANT (1)..(16): Xaa = Any Amino Acid
CCELCCNPACTXXGXC

SEQ ID NO: 5237 - protein, 17 aa, Artificial Sequence
  Synthetically generated peptide
  VARIANT (1)..(17): Xaa = Any Amino Acid
CCELCCNPACTXXGXXC

SEQ ID NO: 5238 - protein, 15 aa, Artificial Sequence
  Synthetically generated peptide
  VARIANT (1)..(15): Xaa = Any Amino Acid
CCELCCNPACTXGXC

SEQ ID NO: 5239 - protein, 16 aa, Artificial Sequence
  Synthetically generated peptide
  VARIANT (1)..(16): Xaa = Any Amino Acid
CCELCCNPACTXGXXC

SEQ ID NO: 5240 - protein, 17 aa, Artificial Sequence
  Synthetically generated peptide
  VARIANT (1)..(17): Xaa = Any Amino Acid
CCELCCNPACTXGXXXC

SEQ ID NO: 5241 - protein, 14 aa, Artificial Sequence
  Synthetically generated peptide
  VARIANT (1)..(14): Xaa = Any Amino Acid
CCELCCNPACTGXC

SEQ ID NO: 5242 - protein, 15 aa, Artificial Sequence
  Synthetically generated peptide
  VARIANT (1)..(15): Xaa = Any Amino Acid
CCELCCNPACTGXXC

SEQ ID NO: 5243 - protein, 16 aa, Artificial Sequence
  Synthetically generated peptide
  VARIANT (1)..(16): Xaa = Any Amino Acid
CCELCCNPACTGXXXC

SEQ ID NO: 5244 - protein, 17 aa, Artificial Sequence
  Synthetically generated peptide
  VARIANT (1)..(17): Xaa = Any Amino Acid
CCELCCNPACTGXXXXC

SEQ ID NO: 5245 - protein, 14 aa, Artificial Sequence
  Synthetically generated peptide
  VARIANT (1)..(14): Xaa = Any Amino Acid
CCXEWCCNPACTGC

SEQ ID NO: 5246 - protein, 15 aa, Artificial Sequence
  Synthetically generated peptide
  VARIANT (1)..(15): Xaa = Any Amino Acid
CCXXEWCCNPACTGC

SEQ ID NO: 5247 - protein, 16 aa, Artificial Sequence
  Synthetically generated peptide
  VARIANT (1)..(16): Xaa = Any Amino Acid
CCXXXEWCCNPACTGC

SEQ ID NO: 5248 - protein, 17 aa, Artificial Sequence
  Synthetically generated peptide
  VARIANT (1)..(17): Xaa = Any Amino Acid
CCXXXXEWCCNPACTGC

SEQ ID NO: 5249 - protein, 17 aa, Artificial Sequence
  Synthetically generated peptide
  VARIANT (1)..(17): Xaa = Any Amino Acid
CCXXXEXWCCNPACTGC

SEQ ID NO: 5250 - protein, 17 aa, Artificial Sequence
  Synthetically generated peptide
  VARIANT (1)..(17): Xaa = Any Amino Acid
CCXXXEWXCCNPACTGC

SEQ ID NO: 5251 - protein, 17 aa, Artificial Sequence
  Synthetically generated peptide
  VARIANT (1)..(17): Xaa = Any Amino Acid
CCXXXEWCCXNPACTGC

SEQ ID NO: 5252 - protein, 17 aa, Artificial Sequence
  Synthetically generated peptide
  VARIANT (1)..(17): Xaa = Any Amino Acid
CCXXXEWCCNXPACTGC

SEQ ID NO: 5253 - protein, 17 aa, Artificial Sequence
  Synthetically generated peptide
  VARIANT (1)..(17): Xaa = Any Amino Acid
CCXXXEWCCNPXACTGC

SEQ ID NO: 5254 - protein, 17 aa, Artificial Sequence
  Synthetically generated peptide
  VARIANT (1)..(17): Xaa = Any Amino Acid
CCXXXEWCCNPAXCTGC

SEQ ID NO: 5255 - protein, 17 aa, Artificial Sequence
  Synthetically generated peptide
  VARIANT (1)..(17): Xaa = Any Amino Acid
CCXXXEWCCNPACXTGC

SEQ ID NO: 5256 - protein, 17 aa, Artificial Sequence
  Synthetically generated peptide
  VARIANT (1)..(17): Xaa = Any Amino Acid
CCXXXEWCCNPACTXGC

SEQ ID NO: 5257 - protein, 17 aa, Artificial Sequence
  Synthetically generated peptide
  VARIANT (1)..(17): Xaa = Any Amino Acid
CCXXXEWCCNPACTGXC

SEQ ID NO: 5258 - protein, 16 aa, Artificial Sequence
  Synthetically generated peptide
  VARIANT (1)..(16): Xaa = Any Amino Acid
CCXXEXWCCNPACTGC

SEQ ID NO: 5259 - protein, 17 aa, Artificial Sequence
  Synthetically generated peptide
  VARIANT (1)..(17): Xaa = Any Amino Acid
CCXXEXXWCCNPACTGC

SEQ ID NO: 5260 - protein, 17 aa, Artificial Sequence
  Synthetically generated peptide
  VARIANT (1)..(17): Xaa = Any Amino Acid
CCXXEXWXCCNPACTGC

SEQ ID NO: 5261 - protein, 17 aa, Artificial Sequence
  Synthetically generated peptide
  VARIANT (1)..(17): Xaa = Any Amino Acid
CCXXEXWCCXNPACTGC

SEQ ID NO: 5262 - protein, 17 aa, Artificial Sequence
  Synthetically generated peptide
  VARIANT (1)..(17): Xaa = Any Amino Acid
CCXXEXWCCNXPACTGC

SEQ ID NO: 5263 - protein, 17 aa, Artificial Sequence
  Synthetically generated peptide
  VARIANT (1)..(17): Xaa = Any Amino Acid
CCXXEXWCCNPXACTGC

SEQ ID NO: 5264 - protein, 17 aa, Artificial Sequence
  Synthetically generated peptide
  VARIANT (1)..(17): Xaa = Any Amino Acid
CCXXEXWCCNPAXCTGC

SEQ ID NO: 5265 - protein, 17 aa, Artificial Sequence
  Synthetically generated peptide
  VARIANT (1)..(17): Xaa = Any Amino Acid
CCXXEXWCCNPACXTGC

SEQ ID NO: 5266 - protein, 17 aa, Artificial Sequence
  Synthetically generated peptide
  VARIANT (1)..(17): Xaa = Any Amino Acid
CCXXEXWCCNPACTXGC

SEQ ID NO: 5267 - protein, 17 aa, Artificial Sequence
  Synthetically generated peptide
  VARIANT (1)..(17): Xaa = Any Amino Acid
CCXXEXWCCNPACTGXC

SEQ ID NO: 5268 - protein, 16 aa, Artificial Sequence
  Synthetically generated peptide
  VARIANT (1)..(16): Xaa = Any Amino Acid
CCXXEWXCCNPACTGC

SEQ ID NO: 5269 - protein, 17 aa, Artificial Sequence
  Synthetically generated peptide
  VARIANT (1)..(17): Xaa = Any Amino Acid
CCXXEWXXCCNPACTGC

SEQ ID NO: 5270 - protein, 17 aa, Artificial Sequence
  Synthetically generated peptide
  VARIANT (1)..(17): Xaa = Any Amino Acid
CCXXEWXCCXNPACTGC

SEQ ID NO: 5271 - protein, 17 aa, Artificial Sequence
  Synthetically generated peptide
  VARIANT (1)..(17): Xaa = Any Amino Acid
CCXXEWXCCNXPACTGC

SEQ ID NO: 5272 - protein, 17 aa, Artificial Sequence
  Synthetically generated peptide
  VARIANT (1)..(17): Xaa = Any Amino Acid
CCXXEWXCCNPXACTGC

SEQ ID NO: 5273 - protein, 17 aa, Artificial Sequence
  Synthetically generated peptide
  VARIANT (1)..(17): Xaa = Any Amino Acid
CCXXEWXCCNPAXCTGC

SEQ ID NO: 5274 - protein, 17 aa, Artificial Sequence
  Synthetically generated peptide
  VARIANT (1)..(17): Xaa = Any Amino Acid
CCXXEWXCCNPACXTGC

SEQ ID NO: 5275 - protein, 17 aa, Artificial Sequence
  Synthetically generated peptide
  VARIANT (1)..(17): Xaa = Any Amino Acid
CCXXEWXCCNPACTXGC

SEQ ID NO: 5276 - protein, 17 aa, Artificial Sequence
  Synthetically generated peptide
  VARIANT (1)..(17): Xaa = Any Amino Acid
CCXXEWXCCNPACTGXC

SEQ ID NO: 5277 - protein, 16 aa, Artificial Sequence
  Synthetically generated peptide
  VARIANT (1)..(16): Xaa = Any Amino Acid
CCXXEWCCXNPACTGC

SEQ ID NO: 5278 - protein, 17 aa, Artificial Sequence
  Synthetically generated peptide
  VARIANT (1)..(17): Xaa = Any Amino Acid
CCXXEWCCXXNPACTGC

SEQ ID NO: 5279 - protein, 17 aa, Artificial Sequence
  Synthetically generated peptide
  VARIANT (1)..(17): Xaa = Any Amino Acid
CCXXEWCCXNXPACTGC

SEQ ID NO: 5280 - protein, 17 aa, Artificial Sequence
  Synthetically generated peptide
  VARIANT (1)..(17): Xaa = Any Amino Acid
CCXXEWCCXNPXACTGC

SEQ ID NO: 5281 - protein, 17 aa, Artificial Sequence
  Synthetically generated peptide
  VARIANT (1)..(17): Xaa = Any Amino Acid
CCXXEWCCXNPAXCTGC

SEQ ID NO: 5282 - protein, 17 aa, Artificial Sequence
  Synthetically generated peptide
  VARIANT (1)..(17): Xaa = Any Amino Acid
CCXXEWCCXNPACXTGC

SEQ ID NO: 5283 - protein, 17 aa, Artificial Sequence
  Synthetically generated peptide
  VARIANT (1)..(17): Xaa = Any Amino Acid
CCXXEWCCXNPACTXGC

SEQ ID NO: 5284 - protein, 17 aa, Artificial Sequence
  Synthetically generated peptide
  VARIANT (1)..(17): Xaa = Any Amino Acid
CCXXEWCCXNPACTGXC

SEQ ID NO: 5285 - protein, 16 aa, Artificial Sequence
  Synthetically generated peptide
  VARIANT (1)..(16): Xaa = Any Amino Acid
CCXXEWCCNXPACTGC

SEQ ID NO: 5286 - protein, 17 aa, Artificial Sequence
  Synthetically generated peptide
  VARIANT (1)..(17): Xaa = Any Amino Acid
CCXXEWCCNXXPACTGC

SEQ ID NO: 5287 - protein, 17 aa, Artificial Sequence
  Synthetically generated peptide
  VARIANT (1)..(17): Xaa = Any Amino Acid
CCXXEWCCNXPXACTGC

SEQ ID NO: 5288 - protein, 17 aa, Artificial Sequence
  Synthetically generated peptide
  VARIANT (1)..(17): Xaa = Any Amino Acid
CCXXEWCCNXPAXCTGC

SEQ ID NO: 5289 - protein, 17 aa, Artificial Sequence
  Synthetically generated peptide
  VARIANT (1)..(17): Xaa = Any Amino Acid
CCXXEWCCNXPACXTGC

SEQ ID NO: 5290 - protein, 17 aa, Artificial Sequence
  Synthetically generated peptide
  VARIANT (1)..(17): Xaa = Any Amino Acid
CCXXEWCCNXPACTXGC

SEQ ID NO: 5291 - protein, 17 aa, Artificial Sequence
  Synthetically generated peptide
  VARIANT (1)..(17): Xaa = Any Amino Acid
CCXXEWCCNXPACTGXC

SEQ ID NO: 5292 - protein, 16 aa, Artificial Sequence
  Synthetically generated peptide
  VARIANT (1)..(16): Xaa = Any Amino Acid
CCXXEWCCNPXACTGC

SEQ ID NO: 5293 - protein, 17 aa, Artificial Sequence
  Synthetically generated peptide
  VARIANT (1)..(17): Xaa = Any Amino Acid
CCXXEWCCNPXXACTGC

SEQ ID NO: 5294 - protein, 17 aa, Artificial Sequence
  Synthetically generated peptide
  VARIANT (1)..(17): Xaa = Any Amino Acid
CCXXEWCCNPXAXCTGC

SEQ ID NO: 5295 - protein, 17 aa, Artificial Sequence
  Synthetically generated peptide
  VARIANT (1)..(17): Xaa = Any Amino Acid
CCXXEWCCNPXACXTGC

SEQ ID NO: 5296 - protein, 17 aa, Artificial Sequence
  Synthetically generated peptide
  VARIANT (1)..(17): Xaa = Any Amino Acid
CCXXEWCCNPXACTXGC

SEQ ID NO: 5297 - protein, 17 aa, Artificial Sequence
  Synthetically generated peptide
  VARIANT (1)..(17): Xaa = Any Amino Acid
CCXXEWCCNPXACTGXC

SEQ ID NO: 5298 - protein, 16 aa, Artificial Sequence
  Synthetically generated peptide
  VARIANT (1)..(16): Xaa = Any Amino Acid
CCXXEWCCNPAXCTGC

SEQ ID NO: 5299 - protein, 17 aa, Artificial Sequence
  Synthetically generated peptide
  VARIANT (1)..(17): Xaa = Any Amino Acid
CCXXEWCCNPAXXCTGC

SEQ ID NO: 5300 - protein, 17 aa, Artificial Sequence
  Synthetically generated peptide
  VARIANT (1)..(17): Xaa = Any Amino Acid
CCXXEWCCNPAXCXTGC

SEQ ID NO: 5301 - protein, 17 aa, Artificial Sequence
  Synthetically generated peptide
  VARIANT (1)..(17): Xaa = Any Amino Acid
CCXXEWCCNPAXCTXGC

SEQ ID NO: 5302 - protein, 17 aa, Artificial Sequence
  Synthetically generated peptide
  VARIANT (1)..(17): Xaa = Any Amino Acid
CCXXEWCCNPAXCTGXC

SEQ ID NO: 5303 - protein, 16 aa, Artificial Sequence
  Synthetically generated peptide
  VARIANT (1)..(16): Xaa = Any Amino Acid
CCXXEWCCNPACXTGC

SEQ ID NO: 5304 - protein, 17 aa, Artificial Sequence
  Synthetically generated peptide
  VARIANT (1)..(17): Xaa = Any Amino Acid
CCXXEWCCNPACXXTGC

SEQ ID NO: 5305 - protein, 17 aa, Artificial Sequence
  Synthetically generated peptide
  VARIANT (1)..(17): Xaa = Any Amino Acid
CCXXEWCCNPACXTXGC

SEQ ID NO: 5306 - protein, 17 aa, Artificial Sequence
  Synthetically generated peptide
  VARIANT (1)..(17): Xaa = Any Amino Acid
CCXXEWCCNPACXTGXC

SEQ ID NO: 5307 - protein, 16 aa, Artificial Sequence
  Synthetically generated peptide
  VARIANT (1)..(16): Xaa = Any Amino Acid
CCXXEWCCNPACTXGC

SEQ ID NO: 5308 - protein, 17 aa, Artificial Sequence
  Synthetically generated peptide
  VARIANT (1)..(17): Xaa = Any Amino Acid
CCXXEWCCNPACTXXGC

SEQ ID NO: 5309 - protein, 17 aa, Artificial Sequence
  Synthetically generated peptide
  VARIANT (1)..(17): Xaa = Any Amino Acid
CCXXEWCCNPACTXGXC

SEQ ID NO: 5310 - protein, 16 aa, Artificial Sequence
  Synthetically generated peptide
  VARIANT (1)..(16): Xaa = Any Amino Acid
CCXXEWCCNPACTGXC

SEQ ID NO: 5311 - protein, 17 aa, Artificial Sequence
  Synthetically generated peptide
  VARIANT (1)..(17): Xaa = Any Amino Acid
CCXXEWCCNPACTGXXC

SEQ ID NO: 5312 - protein, 15 aa, Artificial Sequence
  Synthetically generated peptide
  VARIANT (1)..(15): Xaa = Any Amino Acid
CCXEXWCCNPACTGC

SEQ ID NO: 5313 - protein, 16 aa, Artificial Sequence
  Synthetically generated peptide
  VARIANT (1)..(16): Xaa = Any Amino Acid
CCXEXXWCCNPACTGC

SEQ ID NO: 5314 - protein, 17 aa, Artificial Sequence
  Synthetically generated peptide
  VARIANT (1)..(17): Xaa = Any Amino Acid
CCXEXXXWCCNPACTGC

SEQ ID NO: 5315 - protein, 17 aa, Artificial Sequence
  Synthetically generated peptide
  VARIANT (1)..(17): Xaa = Any Amino Acid
CCXEXXWXCCNPACTGC

SEQ ID NO: 5316 - protein, 17 aa, Artificial Sequence
  Synthetically generated peptide
  VARIANT (1)..(17): Xaa = Any Amino Acid
CCXEXXWCCXNPACTGC

SEQ ID NO: 5317 - protein, 17 aa, Artificial Sequence
  Synthetically generated peptide
  VARIANT (1)..(17): Xaa = Any Amino Acid
CCXEXXWCCNXPACTGC

SEQ ID NO: 5318 - protein, 17 aa, Artificial Sequence
  Synthetically generated peptide
  VARIANT (1)..(17): Xaa = Any Amino Acid
CCXEXXWCCNPXACTGC

SEQ ID NO: 5319 - protein, 17 aa, Artificial Sequence
  Synthetically generated peptide
  VARIANT (1)..(17): Xaa = Any Amino Acid
CCXEXXWCCNPAXCTGC

SEQ ID NO: 5320 - protein, 17 aa, Artificial Sequence
  Synthetically generated peptide
  VARIANT (1)..(17): Xaa = Any Amino Acid
CCXEXXWCCNPACXTGC

SEQ ID NO: 5321 - protein, 17 aa, Artificial Sequence
  Synthetically generated peptide
  VARIANT (1)..(17): Xaa = Any Amino Acid
CCXEXXWCCNPACTXGC

SEQ ID NO: 5322 - protein, 17 aa, Artificial Sequence
  Synthetically generated peptide
  VARIANT (1)..(17): Xaa = Any Amino Acid
CCXEXXWCCNPACTGXC

SEQ ID NO: 5323 - protein, 16 aa, Artificial Sequence
  Synthetically generated peptide
  VARIANT (1)..(16): Xaa = Any Amino Acid
CCXEXWXCCNPACTGC

SEQ ID NO: 5324 - protein, 17 aa, Artificial Sequence
  Synthetically generated peptide
  VARIANT (1)..(17): Xaa = Any Amino Acid
CCXEXWXXCCNPACTGC

SEQ ID NO: 5325 - protein, 17 aa, Artificial Sequence
  Synthetically generated peptide
  VARIANT (1)..(17): Xaa = Any Amino Acid
CCXEXWXCCXNPACTGC

SEQ ID NO: 5326 - protein, 17 aa, Artificial Sequence
  Synthetically generated peptide
  VARIANT (1)..(17): Xaa = Any Amino Acid
CCXEXWXCCNXPACTGC

SEQ ID NO: 5327 - protein, 17 aa, Artificial Sequence
  Synthetically generated peptide
  VARIANT (1)..(17): Xaa = Any Amino Acid
CCXEXWXCCNPXACTGC

SEQ ID NO: 5328 - protein, 17 aa, Artificial Sequence
  Synthetically generated peptide
  VARIANT (1)..(17): Xaa = Any Amino Acid
CCXEXWXCCNPAXCTGC

SEQ ID NO: 5329 - protein, 17 aa, Artificial Sequence
  Synthetically generated peptide
  VARIANT (1)..(17): Xaa = Any Amino Acid
CCXEXWXCCNPACXTGC

SEQ ID NO: 5330 - protein, 17 aa, Artificial Sequence
  Synthetically generated peptide
  VARIANT (1)..(17): Xaa = Any Amino Acid
CCXEXWXCCNPACTXGC

SEQ ID NO: 5331 - protein, 17 aa, Artificial Sequence
  Synthetically generated peptide
  VARIANT (1)..(17): Xaa = Any Amino Acid
CCXEXWXCCNPACTGXC

SEQ ID NO: 5332 - protein, 16 aa, Artificial Sequence
  Synthetically generated peptide
  VARIANT (1)..(16): Xaa = Any Amino Acid
CCXEXWCCXNPACTGC

SEQ ID NO: 5333 - protein, 17 aa, Artificial Sequence
  Synthetically generated peptide
  VARIANT (1)..(17): Xaa = Any Amino Acid
CCXEXWCCXXNPACTGC

SEQ ID NO: 5334 - protein, 17 aa, Artificial Sequence
  Synthetically generated peptide
  VARIANT (1)..(17): Xaa = Any Amino Acid
CCXEXWCCXNXPACTGC

SEQ ID NO: 5335 - protein, 17 aa, Artificial Sequence
  Synthetically generated peptide
  VARIANT (1)..(17): Xaa = Any Amino Acid
CCXEXWCCXNPXACTGC

SEQ ID NO: 5336 - protein, 17 aa, Artificial Sequence
  Synthetically generated peptide
  VARIANT (1)..(17): Xaa = Any Amino Acid
CCXEXWCCXNPAXCTGC

SEQ ID NO: 5337 - protein, 17 aa, Artificial Sequence
  Synthetically generated peptide
  VARIANT (1)..(17): Xaa = Any Amino Acid
CCXEXWCCXNPACXTGC

SEQ ID NO: 5338 - protein, 17 aa, Artificial Sequence
  Synthetically generated peptide
  VARIANT (1)..(17): Xaa = Any Amino Acid
CCXEXWCCXNPACTXGC

SEQ ID NO: 5339 - protein, 17 aa, Artificial Sequence
  Synthetically generated peptide
  VARIANT (1)..(17): Xaa = Any Amino Acid
CCXEXWCCXNPACTGXC

SEQ ID NO: 5340 - protein, 16 aa, Artificial Sequence
  Synthetically generated peptide
  VARIANT (1)..(16): Xaa = Any Amino Acid
CCXEXWCCNXPACTGC

SEQ ID NO: 5341 - protein, 17 aa, Artificial Sequence
  Synthetically generated peptide
  VARIANT (1)..(17): Xaa = Any Amino Acid
CCXEXWCCNXXPACTGC

SEQ ID NO: 5342 - protein, 17 aa, Artificial Sequence
  Synthetically generated peptide
  VARIANT (1)..(17): Xaa = Any Amino Acid
CCXEXWCCNXPXACTGC

SEQ ID NO: 5343 - protein, 17 aa, Artificial Sequence
  Synthetically generated peptide
  VARIANT (1)..(17): Xaa = Any Amino Acid
CCXEXWCCNXPAXCTGC

SEQ ID NO: 5344 - protein, 17 aa, Artificial Sequence
  Synthetically generated peptide
  VARIANT (1)..(17): Xaa = Any Amino Acid
CCXEXWCCNXPACXTGC

SEQ ID NO: 5345 - protein, 17 aa, Artificial Sequence
  Synthetically generated peptide
  VARIANT (1)..(17): Xaa = Any Amino Acid
CCXEXWCCNXPACTXGC

SEQ ID NO: 5346 - protein, 17 aa, Artificial Sequence
  Synthetically generated peptide
  VARIANT (1)..(17): Xaa = Any Amino Acid
CCXEXWCCNXPACTGXC

SEQ ID NO: 5347 - protein, 16 aa, Artificial Sequence
  Synthetically generated peptide
  VARIANT (1)..(16): Xaa = Any Amino Acid
CCXEXWCCNPXACTGC

SEQ ID NO: 5348 - protein, 17 aa, Artificial Sequence
  Synthetically generated peptide
  VARIANT (1)..(17): Xaa = Any Amino Acid
CCXEXWCCNPXXACTGC

SEQ ID NO: 5349 - protein, 17 aa, Artificial Sequence
  Synthetically generated peptide
  VARIANT (1)..(17): Xaa = Any Amino Acid
CCXEXWCCNPXAXCTGC

SEQ ID NO: 5350 - protein, 17 aa, Artificial Sequence
  Synthetically generated peptide
  VARIANT (1)..(17): Xaa = Any Amino Acid
CCXEXWCCNPXACXTGC

SEQ ID NO: 5351 - protein, 17 aa, Artificial Sequence
  Synthetically generated peptide
  VARIANT (1)..(17): Xaa = Any Amino Acid
CCXEXWCCNPXACTXGC

SEQ ID NO: 5352 - protein, 17 aa, Artificial Sequence
  Synthetically generated peptide
  VARIANT (1)..(17): Xaa = Any Amino Acid
CCXEXWCCNPXACTGXC

SEQ ID NO: 5353 - protein, 16 aa, Artificial Sequence
  Synthetically generated peptide
  VARIANT (1)..(16): Xaa = Any Amino Acid
CCXEXWCCNPAXCTGC

SEQ ID NO: 5354 - protein, 17 aa, Artificial Sequence
  Synthetically generated peptide
  VARIANT (1)..(17): Xaa = Any Amino Acid
CCXEXWCCNPAXXCTGC

SEQ ID NO: 5355 - protein, 17 aa, Artificial Sequence
  Synthetically generated peptide
  VARIANT (1)..(17): Xaa = Any Amino Acid
CCXEXWCCNPAXCXTGC

SEQ ID NO: 5356 - protein, 17 aa, Artificial Sequence
  Synthetically generated peptide
  VARIANT (1)..(17): Xaa = Any Amino Acid
CCXEXWCCNPAXCTXGC

SEQ ID NO: 5357 - protein, 17 aa, Artificial Sequence
  Synthetically generated peptide
  VARIANT (1)..(17): Xaa = Any Amino Acid
CCXEXWCCNPAXCTGXC

SEQ ID NO: 5358 - protein, 16 aa, Artificial Sequence
  Synthetically generated peptide
  VARIANT (1)..(16): Xaa = Any Amino Acid
CCXEXWCCNPACXTGC

SEQ ID NO: 5359 - protein, 17 aa, Artificial Sequence
  Synthetically generated peptide
  VARIANT (1)..(17): Xaa = Any Amino Acid
CCXEXWCCNPACXXTGC

SEQ ID NO: 5360 - protein, 17 aa, Artificial Sequence
  Synthetically generated peptide
  VARIANT (1)..(17): Xaa = Any Amino Acid
CCXEXWCCNPACXTXGC

SEQ ID NO: 5361 - protein, 17 aa, Artificial Sequence
  Synthetically generated peptide
  VARIANT (1)..(17): Xaa = Any Amino Acid
CCXEXWCCNPACXTGXC

SEQ ID NO: 5362 - protein, 16 aa, Artificial Sequence
  Synthetically generated peptide
  VARIANT (1)..(16): Xaa = Any Amino Acid
CCXEXWCCNPACTXGC

SEQ ID NO: 5363 - protein, 17 aa, Artificial Sequence
  Synthetically generated peptide
  VARIANT (1)..(17): Xaa = Any Amino Acid
CCXEXWCCNPACTXXGC

SEQ ID NO: 5364 - protein, 17 aa, Artificial Sequence
  Synthetically generated peptide
  VARIANT (1)..(17): Xaa = Any Amino Acid
CCXEXWCCNPACTXGXC

SEQ ID NO: 5365 - protein, 16 aa, Artificial Sequence
  Synthetically generated peptide
  VARIANT (1)..(16): Xaa = Any Amino Acid
CCXEXWCCNPACTGXC

SEQ ID NO: 5366 - protein, 17 aa, Artificial Sequence
  Synthetically generated peptide
  VARIANT (1)..(17): Xaa = Any Amino Acid
CCXEXWCCNPACTGXXC

SEQ ID NO: 5367 - protein, 15 aa, Artificial Sequence
  Synthetically generated peptide
  VARIANT (1)..(15): Xaa = Any Amino Acid
CCXEWXCCNPACTGC

SEQ ID NO: 5368 - protein, 16 aa, Artificial Sequence
  Synthetically generated peptide
  VARIANT (1)..(16): Xaa = Any Amino Acid
CCXEWXXCCNPACTGC

SEQ ID NO: 5369 - protein, 17 aa, Artificial Sequence
  Synthetically generated peptide
  VARIANT (1)..(17): Xaa = Any Amino Acid
CCXEWXXXCCNPACTGC

SEQ ID NO: 5370 - protein, 17 aa, Artificial Sequence
  Synthetically generated peptide
  VARIANT (1)..(17): Xaa = Any Amino Acid
CCXEWXXCCXNPACTGC

SEQ ID NO: 5371 - protein, 17 aa, Artificial Sequence
  Synthetically generated peptide
  VARIANT (1)..(17): Xaa = Any Amino Acid
CCXEWXXCCNXPACTGC

SEQ ID NO: 5372 - protein, 17 aa, Artificial Sequence
  Synthetically generated peptide
  VARIANT (1)..(17): Xaa = Any Amino Acid
CCXEWXXCCNPXACTGC

SEQ ID NO: 5373 - protein, 17 aa, Artificial Sequence
  Synthetically generated peptide
  VARIANT (1)..(17): Xaa = Any Amino Acid
CCXEWXXCCNPAXCTGC

SEQ ID NO: 5374 - protein, 17 aa, Artificial Sequence
  Synthetically generated peptide
  VARIANT (1)..(17): Xaa = Any Amino Acid
CCXEWXXCCNPACXTGC

SEQ ID NO: 5375 - protein, 17 aa, Artificial Sequence
  Synthetically generated peptide
  VARIANT (1)..(17): Xaa = Any Amino Acid
CCXEWXXCCNPACTXGC

SEQ ID NO: 5376 - protein, 17 aa, Artificial Sequence
  Synthetically generated peptide
  VARIANT (1)..(17): Xaa = Any Amino Acid
CCXEWXXCCNPACTGXC

SEQ ID NO: 5377 - protein, 16 aa, Artificial Sequence
  Synthetically generated peptide
  VARIANT (1)..(16): Xaa = Any Amino Acid
CCXEWXCCXNPACTGC

SEQ ID NO: 5378 - protein, 17 aa, Artificial Sequence
  Synthetically generated peptide
  VARIANT (1)..(17): Xaa = Any Amino Acid
CCXEWXCCXXNPACTGC

SEQ ID NO: 5379 - protein, 17 aa, Artificial Sequence
  Synthetically generated peptide
  VARIANT (1)..(17): Xaa = Any Amino Acid
CCXEWXCCXNXPACTGC

SEQ ID NO: 5380 - protein, 17 aa, Artificial Sequence
  Synthetically generated peptide
  VARIANT (1)..(17): Xaa = Any Amino Acid
CCXEWXCCXNPXACTGC

SEQ ID NO: 5381 - protein, 17 aa, Artificial Sequence
  Synthetically generated peptide
  VARIANT (1)..(17): Xaa = Any Amino Acid
CCXEWXCCXNPAXCTGC

SEQ ID NO: 5382 - protein, 17 aa, Artificial Sequence
  Synthetically generated peptide
  VARIANT (1)..(17): Xaa = Any Amino Acid
CCXEWXCCXNPACXTGC

SEQ ID NO: 5383 - protein, 17 aa, Artificial Sequence
  Synthetically generated peptide
  VARIANT (1)..(17): Xaa = Any Amino Acid
CCXEWXCCXNPACTXGC

SEQ ID NO: 5384 - protein, 17 aa, Artificial Sequence
  Synthetically generated peptide
  VARIANT (1)..(17): Xaa = Any Amino Acid
CCXEWXCCXNPACTGXC

SEQ ID NO: 5385 - protein, 16 aa, Artificial Sequence
  Synthetically generated peptide
  VARIANT (1)..(16): Xaa = Any Amino Acid
CCXEWXCCNXPACTGC

SEQ ID NO: 5386 - protein, 17 aa, Artificial Sequence
  Synthetically generated peptide
  VARIANT (1)..(17): Xaa = Any Amino Acid
CCXEWXCCNXXPACTGC

SEQ ID NO: 5387 - protein, 17 aa, Artificial Sequence
  Synthetically generated peptide
  VARIANT (1)..(17): Xaa = Any Amino Acid
CCXEWXCCNXPXACTGC

SEQ ID NO: 5388 - protein, 17 aa, Artificial Sequence
  Synthetically generated peptide
  VARIANT (1)..(17): Xaa = Any Amino Acid
CCXEWXCCNXPAXCTGC

SEQ ID NO: 5389 - protein, 17 aa, Artificial Sequence
  Synthetically generated peptide
  VARIANT (1)..(17): Xaa = Any Amino Acid
CCXEWXCCNXPACXTGC

SEQ ID NO: 5390 - protein, 17 aa, Artificial Sequence
  Synthetically generated peptide
  VARIANT (1)..(17): Xaa = Any Amino Acid
CCXEWXCCNXPACTXGC

SEQ ID NO: 5391 - protein, 17 aa, Artificial Sequence
  Synthetically generated peptide
  VARIANT (1)..(17): Xaa = Any Amino Acid
CCXEWXCCNXPACTGXC

SEQ ID NO: 5392 - protein, 16 aa, Artificial Sequence
  Synthetically generated peptide
  VARIANT (1)..(16): Xaa = Any Amino Acid
CCXEWXCCNPXACTGC

SEQ ID NO: 5393 - protein, 17 aa, Artificial Sequence
  Synthetically generated peptide
  VARIANT (1)..(17): Xaa = Any Amino Acid
CCXEWXCCNPXXACTGC

SEQ ID NO: 5394 - protein, 17 aa, Artificial Sequence
  Synthetically generated peptide
  VARIANT (1)..(17): Xaa = Any Amino Acid
CCXEWXCCNPXAXCTGC

SEQ ID NO: 5395 - protein, 17 aa, Artificial Sequence
  Synthetically generated peptide
  VARIANT (1)..(17): Xaa = Any Amino Acid
CCXEWXCCNPXACXTGC

SEQ ID NO: 5396 - protein, 17 aa, Artificial Sequence
  Synthetically generated peptide
  VARIANT (1)..(17): Xaa = Any Amino Acid
CCXEWXCCNPXACTXGC

SEQ ID NO: 5397 - protein, 17 aa, Artificial Sequence
  Synthetically generated peptide
  VARIANT (1)..(17): Xaa = Any Amino Acid
CCXEWXCCNPXACTGXC

SEQ ID NO: 5398 - protein, 16 aa, Artificial Sequence
  Synthetically generated peptide
  VARIANT (1)..(16): Xaa = Any Amino Acid
CCXEWXCCNPAXCTGC

SEQ ID NO: 5399 - protein, 17 aa, Artificial Sequence
  Synthetically generated peptide
  VARIANT (1)..(17): Xaa = Any Amino Acid
CCXEWXCCNPAXXCTGC

SEQ ID NO: 5400 - protein, 17 aa, Artificial Sequence
  Synthetically generated peptide
  VARIANT (1)..(17): Xaa = Any Amino Acid
CCXEWXCCNPAXCXTGC

SEQ ID NO: 5401 - protein, 17 aa, Artificial Sequence
  Synthetically generated peptide
  VARIANT (1)..(17): Xaa = Any Amino Acid
CCXEWXCCNPAXCTXGC

SEQ ID NO: 5402 - protein, 17 aa, Artificial Sequence
  Synthetically generated peptide
  VARIANT (1)..(17): Xaa = Any Amino Acid
CCXEWXCCNPAXCTGXC

SEQ ID NO: 5403 - protein, 16 aa, Artificial Sequence
  Synthetically generated peptide
  VARIANT (1)..(16): Xaa = Any Amino Acid
CCXEWXCCNPACXTGC

SEQ ID NO: 5404 - protein, 17 aa, Artificial Sequence
  Synthetically generated peptide
  VARIANT (1)..(17): Xaa = Any Amino Acid
CCXEWXCCNPACXXTGC

SEQ ID NO: 5405 - protein, 17 aa, Artificial Sequence
  Synthetically generated peptide
  VARIANT (1)..(17): Xaa = Any Amino Acid
CCXEWXCCNPACXTXGC

SEQ ID NO: 5406 - protein, 17 aa, Artificial Sequence
  Synthetically generated peptide
  VARIANT (1)..(17): Xaa = Any Amino Acid
CCXEWXCCNPACXTGXC

SEQ ID NO: 5407 - protein, 16 aa, Artificial Sequence
  Synthetically generated peptide
  VARIANT (1)..(16): Xaa = Any Amino Acid
CCXEWXCCNPACTXGC

SEQ ID NO: 5408 - protein, 17 aa, Artificial Sequence
  Synthetically generated peptide
  VARIANT (1)..(17): Xaa = Any Amino Acid
CCXEWXCCNPACTXXGC

SEQ ID NO: 5409 - protein, 17 aa, Artificial Sequence
  Synthetically generated peptide
  VARIANT (1)..(17): Xaa = Any Amino Acid
CCXEWXCCNPACTXGXC

SEQ ID NO: 5410 - protein, 16 aa, Artificial Sequence
  Synthetically generated peptide
  VARIANT (1)..(16): Xaa = Any Amino Acid
CCXEWXCCNPACTGXC

SEQ ID NO: 5411 - protein, 17 aa, Artificial Sequence
  Synthetically generated peptide
  VARIANT (1)..(17): Xaa = Any Amino Acid
CCXEWXCCNPACTGXXC

SEQ ID NO: 5412 - protein, 15 aa, Artificial Sequence
  Synthetically generated peptide
  VARIANT (1)..(15): Xaa = Any Amino Acid
CCXEWCCXNPACTGC

SEQ ID NO: 5413 - protein, 16 aa, Artificial Sequence
  Synthetically generated peptide
  VARIANT (1)..(16): Xaa = Any Amino Acid
CCXEWCCXXNPACTGC

SEQ ID NO: 5414 - protein, 17 aa, Artificial Sequence
  Synthetically generated peptide
  VARIANT (1)..(17): Xaa = Any Amino Acid
CCXEWCCXXXNPACTGC

SEQ ID NO: 5415 - protein, 17 aa, Artificial Sequence
  Synthetically generated peptide
  VARIANT (1)..(17): Xaa = Any Amino Acid
CCXEWCCXXNXPACTGC

SEQ ID NO: 5416 - protein, 17 aa, Artificial Sequence
  Synthetically generated peptide
  VARIANT (1)..(17): Xaa = Any Amino Acid
CCXEWCCXXNPXACTGC

SEQ ID NO: 5417 - protein, 17 aa, Artificial Sequence
  Synthetically generated peptide
  VARIANT (1)..(17): Xaa = Any Amino Acid
CCXEWCCXXNPAXCTGC

SEQ ID NO: 5418 - protein, 17 aa, Artificial Sequence
  Synthetically generated peptide
  VARIANT (1)..(17): Xaa = Any Amino Acid
CCXEWCCXXNPACXTGC

SEQ ID NO: 5419 - protein, 17 aa, Artificial Sequence
  Synthetically generated peptide
  VARIANT (1)..(17): Xaa = Any Amino Acid
CCXEWCCXXNPACTXGC

SEQ ID NO: 5420 - protein, 17 aa, Artificial Sequence
  Synthetically generated peptide
  VARIANT (1)..(17): Xaa = Any Amino Acid
CCXEWCCXXNPACTGXC

SEQ ID NO: 5421 - protein, 16 aa, Artificial Sequence
  Synthetically generated peptide
  VARIANT (1)..(16): Xaa = Any Amino Acid
CCXEWCCXNXPACTGC

SEQ ID NO: 5422 - protein, 17 aa, Artificial Sequence
  Synthetically generated peptide
  VARIANT (1)..(17): Xaa = Any Amino Acid
CCXEWCCXNXXPACTGC

SEQ ID NO: 5423 - protein, 17 aa, Artificial Sequence
  Synthetically generated peptide
  VARIANT (1)..(17): Xaa = Any Amino Acid
CCXEWCCXNXPXACTGC

SEQ ID NO: 5424 - protein, 17 aa, Artificial Sequence
  Synthetically generated peptide
  VARIANT (1)..(17): Xaa = Any Amino Acid
CCXEWCCXNXPAXCTGC

SEQ ID NO: 5425 - protein, 17 aa, Artificial Sequence
  Synthetically generated peptide
  VARIANT (1)..(17): Xaa = Any Amino Acid
CCXEWCCXNXPACXTGC

SEQ ID NO: 5426 - protein, 17 aa, Artificial Sequence
  Synthetically generated peptide
  VARIANT (1)..(17): Xaa = Any Amino Acid
CCXEWCCXNXPACTXGC

SEQ ID NO: 5427 - protein, 17 aa, Artificial Sequence
  Synthetically generated peptide
  VARIANT (1)..(17): Xaa = Any Amino Acid
CCXEWCCXNXPACTGXC

SEQ ID NO: 5428 - protein, 16 aa, Artificial Sequence
  Synthetically generated peptide
  VARIANT (1)..(16): Xaa = Any Amino Acid
CCXEWCCXNPXACTGC

SEQ ID NO: 5429 - protein, 17 aa, Artificial Sequence
  Synthetically generated peptide
  VARIANT (1)..(17): Xaa = Any Amino Acid
CCXEWCCXNPXXACTGC

SEQ ID NO: 5430 - protein, 17 aa, Artificial Sequence
  Synthetically generated peptide
  VARIANT (1)..(17): Xaa = Any Amino Acid
CCXEWCCXNPXAXCTGC

SEQ ID NO: 5431 - protein, 17 aa, Artificial Sequence
  Synthetically generated peptide
  VARIANT (1)..(17): Xaa = Any Amino Acid
CCXEWCCXNPXACXTGC

SEQ ID NO: 5432 - protein, 17 aa, Artificial Sequence
  Synthetically generated peptide
  VARIANT (1)..(17): Xaa = Any Amino Acid
CCXEWCCXNPXACTXGC

SEQ ID NO: 5433 - protein, 17 aa, Artificial Sequence
  Synthetically generated peptide
  VARIANT (1)..(17): Xaa = Any Amino Acid
CCXEWCCXNPXACTGXC

SEQ ID NO: 5434 - protein, 16 aa, Artificial Sequence
  Synthetically generated peptide
  VARIANT (1)..(16): Xaa = Any Amino Acid
CCXEWCCXNPAXCTGC

SEQ ID NO: 5435 - protein, 17 aa, Artificial Sequence
  Synthetically generated peptide
  VARIANT (1)..(17): Xaa = Any Amino Acid
CCXEWCCXNPAXXCTGC

SEQ ID NO: 5436 - protein, 17 aa, Artificial Sequence
  Synthetically generated peptide
  VARIANT (1)..(17): Xaa = Any Amino Acid
CCXEWCCXNPAXCXTGC

SEQ ID NO: 5437 - protein, 17 aa, Artificial Sequence
  Synthetically generated peptide
  VARIANT (1)..(17): Xaa = Any Amino Acid
CCXEWCCXNPAXCTXGC

SEQ ID NO: 5438 - protein, 17 aa, Artificial Sequence
  Synthetically generated peptide
  VARIANT (1)..(17): Xaa = Any Amino Acid
CCXEWCCXNPAXCTGXC

SEQ ID NO: 5439 - protein, 16 aa, Artificial Sequence
  Synthetically generated peptide
  VARIANT (1)..(16): Xaa = Any Amino Acid
CCXEWCCXNPACXTGC

SEQ ID NO: 5440 - protein, 17 aa, Artificial Sequence
  Synthetically generated peptide
  VARIANT (1)..(17): Xaa = Any Amino Acid
CCXEWCCXNPACXXTGC

SEQ ID NO: 5441 - protein, 17 aa, Artificial Sequence
  Synthetically generated peptide
  VARIANT (1)..(17): Xaa = Any Amino Acid
CCXEWCCXNPACXTXGC

SEQ ID NO: 5442 - protein, 17 aa, Artificial Sequence
  Synthetically generated peptide
  VARIANT (1)..(17): Xaa = Any Amino Acid
CCXEWCCXNPACXTGXC

SEQ ID NO: 5443 - protein, 16 aa, Artificial Sequence
  Synthetically generated peptide
  VARIANT (1)..(16): Xaa = Any Amino Acid
CCXEWCCXNPACTXGC

SEQ ID NO: 5444 - protein, 17 aa, Artificial Sequence
  Synthetically generated peptide
  VARIANT (1)..(17): Xaa = Any Amino Acid
CCXEWCCXNPACTXXGC

SEQ ID NO: 5445 - protein, 17 aa, Artificial Sequence
  Synthetically generated peptide
  VARIANT (1)..(17): Xaa = Any Amino Acid
CCXEWCCXNPACTXGXC

SEQ ID NO: 5446 - protein, 16 aa, Artificial Sequence
  Synthetically generated peptide
  VARIANT (1)..(16): Xaa = Any Amino Acid
CCXEWCCXNPACTGXC

SEQ ID NO: 5447 - protein, 17 aa, Artificial Sequence
  Synthetically generated peptide
  VARIANT (1)..(17): Xaa = Any Amino Acid
CCXEWCCXNPACTGXXC

SEQ ID NO: 5448 - protein, 15 aa, Artificial Sequence
  Synthetically generated peptide
  VARIANT (1)..(15): Xaa = Any Amino Acid
CCXEWCCNXPACTGC

SEQ ID NO: 5449 - protein, 16 aa, Artificial Sequence
  Synthetically generated peptide
  VARIANT (1)..(16): Xaa = Any Amino Acid
CCXEWCCNXXPACTGC

SEQ ID NO: 5450 - protein, 17 aa, Artificial Sequence
  Synthetically generated peptide
  VARIANT (1)..(17): Xaa = Any Amino Acid
CCXEWCCNXXXPACTGC

SEQ ID NO: 5451 - protein, 17 aa, Artificial Sequence
  Synthetically generated peptide
  VARIANT (1)..(17): Xaa = Any Amino Acid
CCXEWCCNXXPXACTGC

SEQ ID NO: 5452 - protein, 17 aa, Artificial Sequence
  Synthetically generated peptide
  VARIANT (1)..(17): Xaa = Any Amino Acid
CCXEWCCNXXPAXCTGC

SEQ ID NO: 5453 - protein, 17 aa, Artificial Sequence
  Synthetically generated peptide
  VARIANT (1)..(17): Xaa = Any Amino Acid
CCXEWCCNXXPACXTGC

SEQ ID NO: 5454 - protein, 17 aa, Artificial Sequence
  Synthetically generated peptide
  VARIANT (1)..(17): Xaa = Any Amino Acid
CCXEWCCNXXPACTXGC

SEQ ID NO: 5455 - protein, 17 aa, Artificial Sequence
  Synthetically generated peptide
  VARIANT (1)..(17): Xaa = Any Amino Acid
CCXEWCCNXXPACTGXC

SEQ ID NO: 5456 - protein, 16 aa, Artificial Sequence
  Synthetically generated peptide
  VARIANT (1)..(16): Xaa = Any Amino Acid
CCXEWCCNXPXACTGC

SEQ ID NO: 5457 - protein, 17 aa, Artificial Sequence
  Synthetically generated peptide
  VARIANT (1)..(17): Xaa = Any Amino Acid
CCXEWCCNXPXXACTGC

SEQ ID NO: 5458 - protein, 17 aa, Artificial Sequence
  Synthetically generated peptide
  VARIANT (1)..(17): Xaa = Any Amino Acid
CCXEWCCNXPXAXCTGC

SEQ ID NO: 5459 - protein, 17 aa, Artificial Sequence
  Synthetically generated peptide
  VARIANT (1)..(17): Xaa = Any Amino Acid
CCXEWCCNXPXACXTGC

SEQ ID NO: 5460 - protein, 17 aa, Artificial Sequence
  Synthetically generated peptide
  VARIANT (1)..(17): Xaa = Any Amino Acid
CCXEWCCNXPXACTXGC

SEQ ID NO: 5461 - protein, 17 aa, Artificial Sequence
  Synthetically generated peptide
  VARIANT (1)..(17): Xaa = Any Amino Acid
CCXEWCCNXPXACTGXC

SEQ ID NO: 5462 - protein, 16 aa, Artificial Sequence
  Synthetically generated peptide
  VARIANT (1)..(16): Xaa = Any Amino Acid
CCXEWCCNXPAXCTGC

SEQ ID NO: 5463 - protein, 17 aa, Artificial Sequence
  Synthetically generated peptide
  VARIANT (1)..(17): Xaa = Any Amino Acid
CCXEWCCNXPAXXCTGC

SEQ ID NO: 5464 - protein, 17 aa, Artificial Sequence
  Synthetically generated peptide
  VARIANT (1)..(17): Xaa = Any Amino Acid
CCXEWCCNXPAXCXTGC

SEQ ID NO: 5465 - protein, 17 aa, Artificial Sequence
  Synthetically generated peptide
  VARIANT (1)..(17): Xaa = Any Amino Acid
CCXEWCCNXPAXCTXGC

SEQ ID NO: 5466 - protein, 17 aa, Artificial Sequence
  Synthetically generated peptide
  VARIANT (1)..(17): Xaa = Any Amino Acid
CCXEWCCNXPAXCTGXC

SEQ ID NO: 5467 - protein, 16 aa, Artificial Sequence
  Synthetically generated peptide
  VARIANT (1)..(16): Xaa = Any Amino Acid
CCXEWCCNXPACXTGC

SEQ ID NO: 5468 - protein, 17 aa, Artificial Sequence
  Synthetically generated peptide
  VARIANT (1)..(17): Xaa = Any Amino Acid
CCXEWCCNXPACXXTGC

SEQ ID NO: 5469 - protein, 17 aa, Artificial Sequence
  Synthetically generated peptide
  VARIANT (1)..(17): Xaa = Any Amino Acid
CCXEWCCNXPACXTXGC

SEQ ID NO: 5470 - protein, 17 aa, Artificial Sequence
  Synthetically generated peptide
  VARIANT (1)..(17): Xaa = Any Amino Acid
CCXEWCCNXPACXTGXC

SEQ ID NO: 5471 - protein, 16 aa, Artificial Sequence
  Synthetically generated peptide
  VARIANT (1)..(16): Xaa = Any Amino Acid
CCXEWCCNXPACTXGC

SEQ ID NO: 5472 - protein, 17 aa, Artificial Sequence
  Synthetically generated peptide
  VARIANT (1)..(17): Xaa = Any Amino Acid
CCXEWCCNXPACTXXGC

SEQ ID NO: 5473 - protein, 17 aa, Artificial Sequence
  Synthetically generated peptide
  VARIANT (1)..(17): Xaa = Any Amino Acid
CCXEWCCNXPACTXGXC

SEQ ID NO: 5474 - protein, 16 aa, Artificial Sequence
  Synthetically generated peptide
  VARIANT (1)..(16): Xaa = Any Amino Acid
CCXEWCCNXPACTGXC

SEQ ID NO: 5475 - protein, 17 aa, Artificial Sequence
  Synthetically generated peptide
  VARIANT (1)..(17): Xaa = Any Amino Acid
CCXEWCCNXPACTGXXC

SEQ ID NO: 5476 - protein, 15 aa, Artificial Sequence
  Synthetically generated peptide
  VARIANT (1)..(15): Xaa = Any Amino Acid
CCXEWCCNPXACTGC

SEQ ID NO: 5477 - protein, 16 aa, Artificial Sequence
  Synthetically generated peptide
  VARIANT (1)..(16): Xaa = Any Amino Acid
CCXEWCCNPXXACTGC

SEQ ID NO: 5478 - protein, 17 aa, Artificial Sequence
  Synthetically generated peptide
  VARIANT (1)..(17): Xaa = Any Amino Acid
CCXEWCCNPXXXACTGC

SEQ ID NO: 5479 - protein, 17 aa, Artificial Sequence
  Synthetically generated peptide
  VARIANT (1)..(17): Xaa = Any Amino Acid
CCXEWCCNPXXAXCTGC

SEQ ID NO: 5480 - protein, 17 aa, Artificial Sequence
  Synthetically generated peptide
  VARIANT (1)..(17): Xaa = Any Amino Acid
CCXEWCCNPXXACXTGC

SEQ ID NO: 5481 - protein, 17 aa, Artificial Sequence
  Synthetically generated peptide
  VARIANT (1)..(17): Xaa = Any Amino Acid
CCXEWCCNPXXACTXGC

SEQ ID NO: 5482 - protein, 17 aa, Artificial Sequence
  Synthetically generated peptide
  VARIANT (1)..(17): Xaa = Any Amino Acid
CCXEWCCNPXXACTGXC

SEQ ID NO: 5483 - protein, 16 aa, Artificial Sequence
  Synthetically generated peptide
  VARIANT (1)..(16): Xaa = Any Amino Acid
CCXEWCCNPXAXCTGC

SEQ ID NO: 5484 - protein, 17 aa, Artificial Sequence
  Synthetically generated peptide
  VARIANT (1)..(17): Xaa = Any Amino Acid
CCXEWCCNPXAXXCTGC

SEQ ID NO: 5485 - protein, 17 aa, Artificial Sequence
  Synthetically generated peptide
  VARIANT (1)..(17): Xaa = Any Amino Acid
CCXEWCCNPXAXCXTGC

SEQ ID NO: 5486 - protein, 17 aa, Artificial Sequence
  Synthetically generated peptide
  VARIANT (1)..(17): Xaa = Any Amino Acid
CCXEWCCNPXAXCTXGC

SEQ ID NO: 5487 - protein, 17 aa, Artificial Sequence
  Synthetically generated peptide
  VARIANT (1)..(17): Xaa = Any Amino Acid
CCXEWCCNPXAXCTGXC

SEQ ID NO: 5488 - protein, 16 aa, Artificial Sequence
  Synthetically generated peptide
  VARIANT (1)..(16): Xaa = Any Amino Acid
CCXEWCCNPXACXTGC

SEQ ID NO: 5489 - protein, 17 aa, Artificial Sequence
  Synthetically generated peptide
  VARIANT (1)..(17): Xaa = Any Amino Acid
CCXEWCCNPXACXXTGC

SEQ ID NO: 5490 - protein, 17 aa, Artificial Sequence
  Synthetically generated peptide
  VARIANT (1)..(17): Xaa = Any Amino Acid
CCXEWCCNPXACXTXGC

SEQ ID NO: 5491 - protein, 17 aa, Artificial Sequence
  Synthetically generated peptide
  VARIANT (1)..(17): Xaa = Any Amino Acid
CCXEWCCNPXACXTGXC

SEQ ID NO: 5492 - protein, 16 aa, Artificial Sequence
  Synthetically generated peptide
  VARIANT (1)..(16): Xaa = Any Amino Acid
CCXEWCCNPXACTXGC

SEQ ID NO: 5493 - protein, 17 aa, Artificial Sequence
  Synthetically generated peptide
  VARIANT (1)..(17): Xaa = Any Amino Acid
CCXEWCCNPXACTXXGC

SEQ ID NO: 5494 - protein, 17 aa, Artificial Sequence
  Synthetically generated peptide
  VARIANT (1)..(17): Xaa = Any Amino Acid
CCXEWCCNPXACTXGXC

SEQ ID NO: 5495 - protein, 16 aa, Artificial Sequence
  Synthetically generated peptide
  VARIANT (1)..(16): Xaa = Any Amino Acid
CCXEWCCNPXACTGXC

SEQ ID NO: 5496 - protein, 17 aa, Artificial Sequence
  Synthetically generated peptide
  VARIANT (1)..(17): Xaa = Any Amino Acid
CCXEWCCNPXACTGXXC

SEQ ID NO: 5497 - protein, 15 aa, Artificial Sequence
  Synthetically generated peptide
  VARIANT (1)..(15): Xaa = Any Amino Acid
CCXEWCCNPAXCTGC

SEQ ID NO: 5498 - protein, 16 aa, Artificial Sequence
  Synthetically generated peptide
  VARIANT (1)..(16): Xaa = Any Amino Acid
CCXEWCCNPAXXCTGC

SEQ ID NO: 5499 - protein, 17 aa, Artificial Sequence
  Synthetically generated peptide
  VARIANT (1)..(17): Xaa = Any Amino Acid
CCXEWCCNPAXXXCTGC

SEQ ID NO: 5500 - protein, 17 aa, Artificial Sequence
  Synthetically generated peptide
  VARIANT (1)..(17): Xaa = Any Amino Acid
CCXEWCCNPAXXCXTGC

SEQ ID NO: 5501 - protein, 17 aa, Artificial Sequence
  Synthetically generated peptide
  VARIANT (1)..(17): Xaa = Any Amino Acid
CCXEWCCNPAXXCTXGC

SEQ ID NO: 5502 - protein, 17 aa, Artificial Sequence
  Synthetically generated peptide
  VARIANT (1)..(17): Xaa = Any Amino Acid
CCXEWCCNPAXXCTGXC

SEQ ID NO: 5503 - protein, 16 aa, Artificial Sequence
  Synthetically generated peptide
  VARIANT (1)..(16): Xaa = Any Amino Acid
CCXEWCCNPAXCXTGC

SEQ ID NO: 5504 - protein, 17 aa, Artificial Sequence
  Synthetically generated peptide
  VARIANT (1)..(17): Xaa = Any Amino Acid
CCXEWCCNPAXCXXTGC

SEQ ID NO: 5505 - protein, 17 aa, Artificial Sequence
  Synthetically generated peptide
  VARIANT (1)..(17): Xaa = Any Amino Acid
CCXEWCCNPAXCXTXGC

SEQ ID NO: 5506 - protein, 17 aa, Artificial Sequence
  Synthetically generated peptide
  VARIANT (1)..(17): Xaa = Any Amino Acid
CCXEWCCNPAXCXTGXC

SEQ ID NO: 5507 - protein, 16 aa, Artificial Sequence
  Synthetically generated peptide
  VARIANT (1)..(16): Xaa = Any Amino Acid
CCXEWCCNPAXCTXGC

SEQ ID NO: 5508 - protein, 17 aa, Artificial Sequence
  Synthetically generated peptide
  VARIANT (1)..(17): Xaa = Any Amino Acid
CCXEWCCNPAXCTXXGC

SEQ ID NO: 5509 - protein, 17 aa, Artificial Sequence
  Synthetically generated peptide
  VARIANT (1)..(17): Xaa = Any Amino Acid
CCXEWCCNPAXCTXGXC

SEQ ID NO: 5510 - protein, 16 aa, Artificial Sequence
  Synthetically generated peptide
  VARIANT (1)..(16): Xaa = Any Amino Acid
CCXEWCCNPAXCTGXC

SEQ ID NO: 5511 - protein, 17 aa, Artificial Sequence
  Synthetically generated peptide
  VARIANT (1)..(17): Xaa = Any Amino Acid
CCXEWCCNPAXCTGXXC

SEQ ID NO: 5512 - protein, 15 aa, Artificial Sequence
  Synthetically generated peptide
  VARIANT (1)..(15): Xaa = Any Amino Acid
CCXEWCCNPACXTGC

SEQ ID NO: 5513 - protein, 16 aa, Artificial Sequence
  Synthetically generated peptide
  VARIANT (1)..(16): Xaa = Any Amino Acid
CCXEWCCNPACXXTGC

SEQ ID NO: 5514 - protein, 17 aa, Artificial Sequence
  Synthetically generated peptide
  VARIANT (1)..(17): Xaa = Any Amino Acid
CCXEWCCNPACXXXTGC

SEQ ID NO: 5515 - protein, 17 aa, Artificial Sequence
  Synthetically generated peptide
  VARIANT (1)..(17): Xaa = Any Amino Acid
CCXEWCCNPACXXTXGC

SEQ ID NO: 5516 - protein, 17 aa, Artificial Sequence
  Synthetically generated peptide
  VARIANT (1)..(17): Xaa = Any Amino Acid
CCXEWCCNPACXXTGXC

SEQ ID NO: 5517 - protein, 16 aa, Artificial Sequence
  Synthetically generated peptide
  VARIANT (1)..(16): Xaa = Any Amino Acid
CCXEWCCNPACXTXGC

SEQ ID NO: 5518 - protein, 17 aa, Artificial Sequence
  Synthetically generated peptide
  VARIANT (1)..(17): Xaa = Any Amino Acid
CCXEWCCNPACXTXXGC

SEQ ID NO: 5519 - protein, 17 aa, Artificial Sequence
  Synthetically generated peptide
  VARIANT (1)..(17): Xaa = Any Amino Acid
CCXEWCCNPACXTXGXC

SEQ ID NO: 5520 - protein, 16 aa, Artificial Sequence
  Synthetically generated peptide
  VARIANT (1)..(16): Xaa = Any Amino Acid
CCXEWCCNPACXTGXC

SEQ ID NO: 5521 - protein, 17 aa, Artificial Sequence
  Synthetically generated peptide
  VARIANT (1)..(17): Xaa = Any Amino Acid
CCXEWCCNPACXTGXXC

SEQ ID NO: 5522 - protein, 15 aa, Artificial Sequence
  Synthetically generated peptide
  VARIANT (1)..(15): Xaa = Any Amino Acid
CCXEWCCNPACTXGC

SEQ ID NO: 5523 - protein, 16 aa, Artificial Sequence
  Synthetically generated peptide
  VARIANT (1)..(16): Xaa = Any Amino Acid
CCXEWCCNPACTXXGC

SEQ ID NO: 5524 - protein, 17 aa, Artificial Sequence
  Synthetically generated peptide
  VARIANT (1)..(17): Xaa = Any Amino Acid
CCXEWCCNPACTXXXGC

SEQ ID NO: 5525 - protein, 17 aa, Artificial Sequence
  Synthetically generated peptide
  VARIANT (1)..(17): Xaa = Any Amino Acid
CCXEWCCNPACTXXGXC

SEQ ID NO: 5526 - protein, 16 aa, Artificial Sequence
  Synthetically generated peptide
  VARIANT (1)..(16): Xaa = Any Amino Acid
CCXEWCCNPACTXGXC

SEQ ID NO: 5527 - protein, 17 aa, Artificial Sequence
  Synthetically generated peptide
  VARIANT (1)..(17): Xaa = Any Amino Acid
CCXEWCCNPACTXGXXC

SEQ ID NO: 5528 - protein, 15 aa, Artificial Sequence
  Synthetically generated peptide
  VARIANT (1)..(15): Xaa = Any Amino Acid
CCXEWCCNPACTGXC

SEQ ID NO: 5529 - protein, 16 aa, Artificial Sequence
  Synthetically generated peptide
  VARIANT (1)..(16): Xaa = Any Amino Acid
CCXEWCCNPACTGXXC

SEQ ID NO: 5530 - protein, 17 aa, Artificial Sequence
  Synthetically generated peptide
  VARIANT (1)..(17): Xaa = Any Amino Acid
CCXEWCCNPACTGXXXC

SEQ ID NO: 5531 - protein, 14 aa, Artificial Sequence
  Synthetically generated peptide
  VARIANT (1)..(14): Xaa = Any Amino Acid
CCEXWCCNPACTGC

SEQ ID NO: 5532 - protein, 15 aa, Artificial Sequence
  Synthetically generated peptide
  VARIANT (1)..(15): Xaa = Any Amino Acid
CCEXXWCCNPACTGC

SEQ ID NO: 5533 - protein, 16 aa, Artificial Sequence
  Synthetically generated peptide
  VARIANT (1)..(16): Xaa = Any Amino Acid
CCEXXXWCCNPACTGC

SEQ ID NO: 5534 - protein, 17 aa, Artificial Sequence
  Synthetically generated peptide
  VARIANT (1)..(17): Xaa = Any Amino Acid
CCEXXXXWCCNPACTGC

SEQ ID NO: 5535 - protein, 17 aa, Artificial Sequence
  Synthetically generated peptide
  VARIANT (1)..(17): Xaa = Any Amino Acid
CCEXXXWXCCNPACTGC

SEQ ID NO: 5536 - protein, 17 aa, Artificial Sequence
  Synthetically generated peptide
  VARIANT (1)..(17): Xaa = Any Amino Acid
CCEXXXWCCXNPACTGC

SEQ ID NO: 5537 - protein, 17 aa, Artificial Sequence
  Synthetically generated peptide
  VARIANT (1)..(17): Xaa = Any Amino Acid
CCEXXXWCCNXPACTGC

SEQ ID NO: 5538 - protein, 17 aa, Artificial Sequence
  Synthetically generated peptide
  VARIANT (1)..(17): Xaa = Any Amino Acid
CCEXXXWCCNPXACTGC

SEQ ID NO: 5539 - protein, 17 aa, Artificial Sequence
  Synthetically generated peptide
  VARIANT (1)..(17): Xaa = Any Amino Acid
CCEXXXWCCNPAXCTGC

SEQ ID NO: 5540 - protein, 17 aa, Artificial Sequence
  Synthetically generated peptide
  VARIANT (1)..(17): Xaa = Any Amino Acid
CCEXXXWCCNPACXTGC

SEQ ID NO: 5541 - protein, 17 aa, Artificial Sequence
  Synthetically generated peptide
  VARIANT (1)..(17): Xaa = Any Amino Acid
CCEXXXWCCNPACTXGC

SEQ ID NO: 5542 - protein, 17 aa, Artificial Sequence
  Synthetically generated peptide
  VARIANT (1)..(17): Xaa = Any Amino Acid
CCEXXXWCCNPACTGXC

SEQ ID NO: 5543 - protein, 16 aa, Artificial Sequence
  Synthetically generated peptide
  VARIANT (1)..(16): Xaa = Any Amino Acid
CCEXXWXCCNPACTGC

SEQ ID NO: 5544 - protein, 17 aa, Artificial Sequence
  Synthetically generated peptide
  VARIANT (1)..(17): Xaa = Any Amino Acid
CCEXXWXXCCNPACTGC

SEQ ID NO: 5545 - protein, 17 aa, Artificial Sequence
  Synthetically generated peptide
  VARIANT (1)..(17): Xaa = Any Amino Acid
CCEXXWXCCXNPACTGC

SEQ ID NO: 5546 - protein, 17 aa, Artificial Sequence
  Synthetically generated peptide
  VARIANT (1)..(17): Xaa = Any Amino Acid
CCEXXWXCCNXPACTGC

SEQ ID NO: 5547 - protein, 17 aa, Artificial Sequence
  Synthetically generated peptide
  VARIANT (1)..(17): Xaa = Any Amino Acid
CCEXXWXCCNPXACTGC

SEQ ID NO: 5548 - protein, 17 aa, Artificial Sequence
  Synthetically generated peptide
  VARIANT (1)..(17): Xaa = Any Amino Acid
CCEXXWXCCNPAXCTGC

SEQ ID NO: 5549 - protein, 17 aa, Artificial Sequence
  Synthetically generated peptide
  VARIANT (1)..(17): Xaa = Any Amino Acid
CCEXXWXCCNPACXTGC

SEQ ID NO: 5550 - protein, 17 aa, Artificial Sequence
  Synthetically generated peptide
  VARIANT (1)..(17): Xaa = Any Amino Acid
CCEXXWXCCNPACTXGC

SEQ ID NO: 5551 - protein, 17 aa, Artificial Sequence
  Synthetically generated peptide
  VARIANT (1)..(17): Xaa = Any Amino Acid
CCEXXWXCCNPACTGXC

SEQ ID NO: 5552 - protein, 16 aa, Artificial Sequence
  Synthetically generated peptide
  VARIANT (1)..(16): Xaa = Any Amino Acid
CCEXXWCCXNPACTGC

SEQ ID NO: 5553 - protein, 17 aa, Artificial Sequence
  Synthetically generated peptide
  VARIANT (1)..(17): Xaa = Any Amino Acid
CCEXXWCCXXNPACTGC

SEQ ID NO: 5554 - protein, 17 aa, Artificial Sequence
  Synthetically generated peptide
  VARIANT (1)..(17): Xaa = Any Amino Acid
CCEXXWCCXNXPACTGC

SEQ ID NO: 5555 - protein, 17 aa, Artificial Sequence
  Synthetically generated peptide
  VARIANT (1)..(17): Xaa = Any Amino Acid
CCEXXWCCXNPXACTGC

SEQ ID NO: 5556 - protein, 17 aa, Artificial Sequence
  Synthetically generated peptide
  VARIANT (1)..(17): Xaa = Any Amino Acid
CCEXXWCCXNPAXCTGC

SEQ ID NO: 5557 - protein, 17 aa, Artificial Sequence
  Synthetically generated peptide
  VARIANT (1)..(17): Xaa = Any Amino Acid
CCEXXWCCXNPACXTGC

SEQ ID NO: 5558 - protein, 17 aa, Artificial Sequence
  Synthetically generated peptide
  VARIANT (1)..(17): Xaa = Any Amino Acid
CCEXXWCCXNPACTXGC

SEQ ID NO: 5559 - protein, 17 aa, Artificial Sequence
  Synthetically generated peptide
  VARIANT (1)..(17): Xaa = Any Amino Acid
CCEXXWCCXNPACTGXC

SEQ ID NO: 5560 - protein, 16 aa, Artificial Sequence
  Synthetically generated peptide
  VARIANT (1)..(16): Xaa = Any Amino Acid
CCEXXWCCNXPACTGC

SEQ ID NO: 5561 - protein, 17 aa, Artificial Sequence
  Synthetically generated peptide
  VARIANT (1)..(17): Xaa = Any Amino Acid
CCEXXWCCNXXPACTGC

SEQ ID NO: 5562 - protein, 17 aa, Artificial Sequence
  Synthetically generated peptide
  VARIANT (1)..(17): Xaa = Any Amino Acid
CCEXXWCCNXPXACTGC

SEQ ID NO: 5563 - protein, 17 aa, Artificial Sequence
  Synthetically generated peptide
  VARIANT (1)..(17): Xaa = Any Amino Acid
CCEXXWCCNXPAXCTGC

SEQ ID NO: 5564 - protein, 17 aa, Artificial Sequence
  Synthetically generated peptide
  VARIANT (1)..(17): Xaa = Any Amino Acid
CCEXXWCCNXPACXTGC

SEQ ID NO: 5565 - protein, 17 aa, Artificial Sequence
  Synthetically generated peptide
  VARIANT (1)..(17): Xaa = Any Amino Acid
CCEXXWCCNXPACTXGC

SEQ ID NO: 5566 - protein, 17 aa, Artificial Sequence
  Synthetically generated peptide
  VARIANT (1)..(17): Xaa = Any Amino Acid
CCEXXWCCNXPACTGXC

SEQ ID NO: 5567 - protein, 16 aa, Artificial Sequence
  Synthetically generated peptide
  VARIANT (1)..(16): Xaa = Any Amino Acid
CCEXXWCCNPXACTGC

SEQ ID NO: 5568 - protein, 17 aa, Artificial Sequence
  Synthetically generated peptide
  VARIANT (1)..(17): Xaa = Any Amino Acid
CCEXXWCCNPXXACTGC

SEQ ID NO: 5569 - protein, 17 aa, Artificial Sequence
  Synthetically generated peptide
  VARIANT (1)..(17): Xaa = Any Amino Acid
CCEXXWCCNPXAXCTGC

SEQ ID NO: 5570 - protein, 17 aa, Artificial Sequence
  Synthetically generated peptide
  VARIANT (1)..(17): Xaa = Any Amino Acid
CCEXXWCCNPXACXTGC

SEQ ID NO: 5571 - protein, 17 aa, Artificial Sequence
  Synthetically generated peptide
  VARIANT (1)..(17): Xaa = Any Amino Acid
CCEXXWCCNPXACTXGC

SEQ ID NO: 5572 - protein, 17 aa, Artificial Sequence
  Synthetically generated peptide
  VARIANT (1)..(17): Xaa = Any Amino Acid
CCEXXWCCNPXACTGXC

SEQ ID NO: 5573 - protein, 16 aa, Artificial Sequence
  Synthetically generated peptide
  VARIANT (1)..(16): Xaa = Any Amino Acid
CCEXXWCCNPAXCTGC

SEQ ID NO: 5574 - protein, 17 aa, Artificial Sequence
  Synthetically generated peptide
  VARIANT (1)..(17): Xaa = Any Amino Acid
CCEXXWCCNPAXXCTGC

SEQ ID NO: 5575 - protein, 17 aa, Artificial Sequence
  Synthetically generated peptide
  VARIANT (1)..(17): Xaa = Any Amino Acid
CCEXXWCCNPAXCXTGC

SEQ ID NO: 5576 - protein, 17 aa, Artificial Sequence
  Synthetically generated peptide
  VARIANT (1)..(17): Xaa = Any Amino Acid
CCEXXWCCNPAXCTXGC

SEQ ID NO: 5577 - protein, 17 aa, Artificial Sequence
  Synthetically generated peptide
  VARIANT (1)..(17): Xaa = Any Amino Acid
CCEXXWCCNPAXCTGXC

SEQ ID NO: 5578 - protein, 16 aa, Artificial Sequence
  Synthetically generated peptide
  VARIANT (1)..(16): Xaa = Any Amino Acid
CCEXXWCCNPACXTGC

SEQ ID NO: 5579 - protein, 17 aa, Artificial Sequence
  Synthetically generated peptide
  VARIANT (1)..(17): Xaa = Any Amino Acid
CCEXXWCCNPACXXTGC

SEQ ID NO: 5580 - protein, 17 aa, Artificial Sequence
  Synthetically generated peptide
  VARIANT (1)..(17): Xaa = Any Amino Acid
CCEXXWCCNPACXTXGC

SEQ ID NO: 5581 - protein, 17 aa, Artificial Sequence
  Synthetically generated peptide
  VARIANT (1)..(17): Xaa = Any Amino Acid
CCEXXWCCNPACXTGXC

SEQ ID NO: 5582 - protein, 16 aa, Artificial Sequence
  Synthetically generated peptide
  VARIANT (1)..(16): Xaa = Any Amino Acid
CCEXXWCCNPACTXGC

SEQ ID NO: 5583 - protein, 17 aa, Artificial Sequence
  Synthetically generated peptide
  VARIANT (1)..(17): Xaa = Any Amino Acid
CCEXXWCCNPACTXXGC

SEQ ID NO: 5584 - protein, 17 aa, Artificial Sequence
  Synthetically generated peptide
  VARIANT (1)..(17): Xaa = Any Amino Acid
CCEXXWCCNPACTXGXC

SEQ ID NO: 5585 - protein, 16 aa, Artificial Sequence
  Synthetically generated peptide
  VARIANT (1)..(16): Xaa = Any Amino Acid
CCEXXWCCNPACTGXC

SEQ ID NO: 5586 - protein, 17 aa, Artificial Sequence
  Synthetically generated peptide
  VARIANT (1)..(17): Xaa = Any Amino Acid
CCEXXWCCNPACTGXXC

SEQ ID NO: 5587 - protein, 15 aa, Artificial Sequence
  Synthetically generated peptide
  VARIANT (1)..(15): Xaa = Any Amino Acid
CCEXWXCCNPACTGC

SEQ ID NO: 5588 - protein, 16 aa, Artificial Sequence
  Synthetically generated peptide
  VARIANT (1)..(16): Xaa = Any Amino Acid
CCEXWXXCCNPACTGC

SEQ ID NO: 5589 - protein, 17 aa, Artificial Sequence
  Synthetically generated peptide
  VARIANT (1)..(17): Xaa = Any Amino Acid
CCEXWXXXCCNPACTGC

SEQ ID NO: 5590 - protein, 17 aa, Artificial Sequence
  Synthetically generated peptide
  VARIANT (1)..(17): Xaa = Any Amino Acid
CCEXWXXCCXNPACTGC

SEQ ID NO: 5591 - protein, 17 aa, Artificial Sequence
  Synthetically generated peptide
  VARIANT (1)..(17): Xaa = Any Amino Acid
CCEXWXXCCNXPACTGC

SEQ ID NO: 5592 - protein, 17 aa, Artificial Sequence
  Synthetically generated peptide
  VARIANT (1)..(17): Xaa = Any Amino Acid
CCEXWXXCCNPXACTGC

SEQ ID NO: 5593 - protein, 17 aa, Artificial Sequence
  Synthetically generated peptide
  VARIANT (1)..(17): Xaa = Any Amino Acid
CCEXWXXCCNPAXCTGC

SEQ ID NO: 5594 - protein, 17 aa, Artificial Sequence
  Synthetically generated peptide
  VARIANT (1)..(17): Xaa = Any Amino Acid
CCEXWXXCCNPACXTGC

SEQ ID NO: 5595 - protein, 17 aa, Artificial Sequence
  Synthetically generated peptide
  VARIANT (1)..(17): Xaa = Any Amino Acid
CCEXWXXCCNPACTXGC

SEQ ID NO: 5596 - protein, 17 aa, Artificial Sequence
  Synthetically generated peptide
  VARIANT (1)..(17): Xaa = Any Amino Acid
CCEXWXXCCNPACTGXC

SEQ ID NO: 5597 - protein, 16 aa, Artificial Sequence
  Synthetically generated peptide
  VARIANT (1)..(16): Xaa = Any Amino Acid
CCEXWXCCXNPACTGC

SEQ ID NO: 5598 - protein, 17 aa, Artificial Sequence
  Synthetically generated peptide
  VARIANT (1)..(17): Xaa = Any Amino Acid
CCEXWXCCXXNPACTGC

SEQ ID NO: 5599 - protein, 17 aa, Artificial Sequence
  Synthetically generated peptide
  VARIANT (1)..(17): Xaa = Any Amino Acid
CCEXWXCCXNXPACTGC

SEQ ID NO: 5600 - protein, 17 aa, Artificial Sequence
  Synthetically generated peptide
  VARIANT (1)..(17): Xaa = Any Amino Acid
CCEXWXCCXNPXACTGC

SEQ ID NO: 5601 - protein, 17 aa, Artificial Sequence
  Synthetically generated peptide
  VARIANT (1)..(17): Xaa = Any Amino Acid
CCEXWXCCXNPAXCTGC

SEQ ID NO: 5602 - protein, 17 aa, Artificial Sequence
  Synthetically generated peptide
  VARIANT (1)..(17): Xaa = Any Amino Acid
CCEXWXCCXNPACXTGC

SEQ ID NO: 5603 - protein, 17 aa, Artificial Sequence
  Synthetically generated peptide
  VARIANT (1)..(17): Xaa = Any Amino Acid
CCEXWXCCXNPACTXGC

SEQ ID NO: 5604 - protein, 17 aa, Artificial Sequence
  Synthetically generated peptide
  VARIANT (1)..(17): Xaa = Any Amino Acid
CCEXWXCCXNPACTGXC

SEQ ID NO: 5605 - protein, 16 aa, Artificial Sequence
  Synthetically generated peptide
  VARIANT (1)..(16): Xaa = Any Amino Acid
CCEXWXCCNXPACTGC

SEQ ID NO: 5606 - protein, 17 aa, Artificial Sequence
  Synthetically generated peptide
  VARIANT (1)..(17): Xaa = Any Amino Acid
CCEXWXCCNXXPACTGC

SEQ ID NO: 5607 - protein, 17 aa, Artificial Sequence
  Synthetically generated peptide
  VARIANT (1)..(17): Xaa = Any Amino Acid
CCEXWXCCNXPXACTGC

SEQ ID NO: 5608 - protein, 17 aa, Artificial Sequence
  Synthetically generated peptide
  VARIANT (1)..(17): Xaa = Any Amino Acid
CCEXWXCCNXPAXCTGC

SEQ ID NO: 5609 - protein, 17 aa, Artificial Sequence
  Synthetically generated peptide
  VARIANT (1)..(17): Xaa = Any Amino Acid
CCEXWXCCNXPACXTGC

SEQ ID NO: 5610 - protein, 17 aa, Artificial Sequence
  Synthetically generated peptide
  VARIANT (1)..(17): Xaa = Any Amino Acid
CCEXWXCCNXPACTXGC

SEQ ID NO: 5611 - protein, 17 aa, Artificial Sequence
  Synthetically generated peptide
  VARIANT (1)..(17): Xaa = Any Amino Acid
CCEXWXCCNXPACTGXC

SEQ ID NO: 5612 - protein, 16 aa, Artificial Sequence
  Synthetically generated peptide
  VARIANT (1)..(16): Xaa = Any Amino Acid
CCEXWXCCNPXACTGC

SEQ ID NO: 5613 - protein, 17 aa, Artificial Sequence
  Synthetically generated peptide
  VARIANT (1)..(17): Xaa = Any Amino Acid
CCEXWXCCNPXXACTGC

SEQ ID NO: 5614 - protein, 17 aa, Artificial Sequence
  Synthetically generated peptide
  VARIANT (1)..(17): Xaa = Any Amino Acid
CCEXWXCCNPXAXCTGC

SEQ ID NO: 5615 - protein, 17 aa, Artificial Sequence
  Synthetically generated peptide
  VARIANT (1)..(17): Xaa = Any Amino Acid
CCEXWXCCNPXACXTGC

SEQ ID NO: 5616 - protein, 17 aa, Artificial Sequence
  Synthetically generated peptide
  VARIANT (1)..(17): Xaa = Any Amino Acid
CCEXWXCCNPXACTXGC

SEQ ID NO: 5617 - protein, 17 aa, Artificial Sequence
  Synthetically generated peptide
  VARIANT (1)..(17): Xaa = Any Amino Acid
CCEXWXCCNPXACTGXC

SEQ ID NO: 5618 - protein, 16 aa, Artificial Sequence
  Synthetically generated peptide
  VARIANT (1)..(16): Xaa = Any Amino Acid
CCEXWXCCNPAXCTGC

SEQ ID NO: 5619 - protein, 17 aa, Artificial Sequence
  Synthetically generated peptide
  VARIANT (1)..(17): Xaa = Any Amino Acid
CCEXWXCCNPAXXCTGC

SEQ ID NO: 5620 - protein, 17 aa, Artificial Sequence
  Synthetically generated peptide
  VARIANT (1)..(17): Xaa = Any Amino Acid
CCEXWXCCNPAXCXTGC

SEQ ID NO: 5621 - protein, 17 aa, Artificial Sequence
  Synthetically generated peptide
  VARIANT (1)..(17): Xaa = Any Amino Acid
CCEXWXCCNPAXCTXGC

SEQ ID NO: 5622 - protein, 17 aa, Artificial Sequence
  Synthetically generated peptide
  VARIANT (1)..(17): Xaa = Any Amino Acid
CCEXWXCCNPAXCTGXC

SEQ ID NO: 5623 - protein, 16 aa, Artificial Sequence
  Synthetically generated peptide
  VARIANT (1)..(16): Xaa = Any Amino Acid
CCEXWXCCNPACXTGC

SEQ ID NO: 5624 - protein, 17 aa, Artificial Sequence
  Synthetically generated peptide
  VARIANT (1)..(17): Xaa = Any Amino Acid
CCEXWXCCNPACXXTGC

SEQ ID NO: 5625 - protein, 17 aa, Artificial Sequence
  Synthetically generated peptide
  VARIANT (1)..(17): Xaa = Any Amino Acid
CCEXWXCCNPACXTXGC

SEQ ID NO: 5626 - protein, 17 aa, Artificial Sequence
  Synthetically generated peptide
  VARIANT (1)..(17): Xaa = Any Amino Acid
CCEXWXCCNPACXTGXC

SEQ ID NO: 5627 - protein, 16 aa, Artificial Sequence
  Synthetically generated peptide
  VARIANT (1)..(16): Xaa = Any Amino Acid
CCEXWXCCNPACTXGC

SEQ ID NO: 5628 - protein, 17 aa, Artificial Sequence
  Synthetically generated peptide
  VARIANT (1)..(17): Xaa = Any Amino Acid
CCEXWXCCNPACTXXGC

SEQ ID NO: 5629 - protein, 17 aa, Artificial Sequence
  Synthetically generated peptide
  VARIANT (1)..(17): Xaa = Any Amino Acid
CCEXWXCCNPACTXGXC

SEQ ID NO: 5630 - protein, 16 aa, Artificial Sequence
  Synthetically generated peptide
  VARIANT (1)..(16): Xaa = Any Amino Acid
CCEXWXCCNPACTGXC

SEQ ID NO: 5631 - protein, 17 aa, Artificial Sequence
  Synthetically generated peptide
  VARIANT (1)..(17): Xaa = Any Amino Acid
CCEXWXCCNPACTGXXC

SEQ ID NO: 5632 - protein, 15 aa, Artificial Sequence
  Synthetically generated peptide
  VARIANT (1)..(15): Xaa = Any Amino Acid
CCEXWCCXNPACTGC

SEQ ID NO: 5633 - protein, 16 aa, Artificial Sequence
  Synthetically generated peptide
  VARIANT (1)..(16): Xaa = Any Amino Acid
CCEXWCCXXNPACTGC

SEQ ID NO: 5634 - protein, 17 aa, Artificial Sequence
  Synthetically generated peptide
  VARIANT (1)..(17): Xaa = Any Amino Acid
CCEXWCCXXXNPACTGC

SEQ ID NO: 5635 - protein, 17 aa, Artificial Sequence
  Synthetically generated peptide
  VARIANT (1)..(17): Xaa = Any Amino Acid
CCEXWCCXXNXPACTGC

SEQ ID NO: 5636 - protein, 17 aa, Artificial Sequence
  Synthetically generated peptide
  VARIANT (1)..(17): Xaa = Any Amino Acid
CCEXWCCXXNPXACTGC

SEQ ID NO: 5637 - protein, 17 aa, Artificial Sequence
  Synthetically generated peptide
  VARIANT (1)..(17): Xaa = Any Amino Acid
CCEXWCCXXNPAXCTGC

SEQ ID NO: 5638 - protein, 17 aa, Artificial Sequence
  Synthetically generated peptide
  VARIANT (1)..(17): Xaa = Any Amino Acid
CCEXWCCXXNPACXTGC

SEQ ID NO: 5639 - protein, 17 aa, Artificial Sequence
  Synthetically generated peptide
  VARIANT (1)..(17): Xaa = Any Amino Acid
CCEXWCCXXNPACTXGC

SEQ ID NO: 5640 - protein, 17 aa, Artificial Sequence
  Synthetically generated peptide
  VARIANT (1)..(17): Xaa = Any Amino Acid
CCEXWCCXXNPACTGXC

SEQ ID NO: 5641 - protein, 16 aa, Artificial Sequence
  Synthetically generated peptide
  VARIANT (1)..(16): Xaa = Any Amino Acid
CCEXWCCXNXPACTGC

SEQ ID NO: 5642 - protein, 17 aa, Artificial Sequence
  Synthetically generated peptide
  VARIANT (1)..(17): Xaa = Any Amino Acid
CCEXWCCXNXXPACTGC

SEQ ID NO: 5643 - protein, 17 aa, Artificial Sequence
  Synthetically generated peptide
  VARIANT (1)..(17): Xaa = Any Amino Acid
CCEXWCCXNXPXACTGC

SEQ ID NO: 5644 - protein, 17 aa, Artificial Sequence
  Synthetically generated peptide
  VARIANT (1)..(17): Xaa = Any Amino Acid
CCEXWCCXNXPAXCTGC

SEQ ID NO: 5645 - protein, 17 aa, Artificial Sequence
  Synthetically generated peptide
  VARIANT (1)..(17): Xaa = Any Amino Acid
CCEXWCCXNXPACXTGC

SEQ ID NO: 5646 - protein, 17 aa, Artificial Sequence
  Synthetically generated peptide
  VARIANT (1)..(17): Xaa = Any Amino Acid
CCEXWCCXNXPACTXGC

SEQ ID NO: 5647 - protein, 17 aa, Artificial Sequence
  Synthetically generated peptide
  VARIANT (1)..(17): Xaa = Any Amino Acid
CCEXWCCXNXPACTGXC

SEQ ID NO: 5648 - protein, 16 aa, Artificial Sequence
  Synthetically generated peptide
  VARIANT (1)..(16): Xaa = Any Amino Acid
CCEXWCCXNPXACTGC

SEQ ID NO: 5649 - protein, 17 aa, Artificial Sequence
  Synthetically generated peptide
  VARIANT (1)..(17): Xaa = Any Amino Acid
CCEXWCCXNPXXACTGC

SEQ ID NO: 5650 - protein, 17 aa, Artificial Sequence
  Synthetically generated peptide
  VARIANT (1)..(17): Xaa = Any Amino Acid
CCEXWCCXNPXAXCTGC

SEQ ID NO: 5651 - protein, 17 aa, Artificial Sequence
  Synthetically generated peptide
  VARIANT (1)..(17): Xaa = Any Amino Acid
CCEXWCCXNPXACXTGC

SEQ ID NO: 5652 - protein, 17 aa, Artificial Sequence
  Synthetically generated peptide
  VARIANT (1)..(17): Xaa = Any Amino Acid
CCEXWCCXNPXACTXGC

SEQ ID NO: 5653 - protein, 17 aa, Artificial Sequence
  Synthetically generated peptide
  VARIANT (1)..(17): Xaa = Any Amino Acid
CCEXWCCXNPXACTGXC

SEQ ID NO: 5654 - protein, 16 aa, Artificial Sequence
  Synthetically generated peptide
  VARIANT (1)..(16): Xaa = Any Amino Acid
CCEXWCCXNPAXCTGC

SEQ ID NO: 5655 - protein, 17 aa, Artificial Sequence
  Synthetically generated peptide
  VARIANT (1)..(17): Xaa = Any Amino Acid
CCEXWCCXNPAXXCTGC

SEQ ID NO: 5656 - protein, 17 aa, Artificial Sequence
  Synthetically generated peptide
  VARIANT (1)..(17): Xaa = Any Amino Acid
CCEXWCCXNPAXCXTGC

SEQ ID NO: 5657 - protein, 17 aa, Artificial Sequence
  Synthetically generated peptide
  VARIANT (1)..(17): Xaa = Any Amino Acid
CCEXWCCXNPAXCTXGC

SEQ ID NO: 5658 - protein, 17 aa, Artificial Sequence
  Synthetically generated peptide
  VARIANT (1)..(17): Xaa = Any Amino Acid
CCEXWCCXNPAXCTGXC

SEQ ID NO: 5659 - protein, 16 aa, Artificial Sequence
  Synthetically generated peptide
  VARIANT (1)..(16): Xaa = Any Amino Acid
CCEXWCCXNPACXTGC

SEQ ID NO: 5660 - protein, 17 aa, Artificial Sequence
  Synthetically generated peptide
  VARIANT (1)..(17): Xaa = Any Amino Acid
CCEXWCCXNPACXXTGC

SEQ ID NO: 5661 - protein, 17 aa, Artificial Sequence
  Synthetically generated peptide
  VARIANT (1)..(17): Xaa = Any Amino Acid
CCEXWCCXNPACXTXGC

SEQ ID NO: 5662 - protein, 17 aa, Artificial Sequence
  Synthetically generated peptide
  VARIANT (1)..(17): Xaa = Any Amino Acid
CCEXWCCXNPACXTGXC

SEQ ID NO: 5663 - protein, 16 aa, Artificial Sequence
  Synthetically generated peptide
  VARIANT (1)..(16): Xaa = Any Amino Acid
CCEXWCCXNPACTXGC

SEQ ID NO: 5664 - protein, 17 aa, Artificial Sequence
  Synthetically generated peptide
  VARIANT (1)..(17): Xaa = Any Amino Acid
CCEXWCCXNPACTXXGC

SEQ ID NO: 5665 - protein, 17 aa, Artificial Sequence
  Synthetically generated peptide
  VARIANT (1)..(17): Xaa = Any Amino Acid
CCEXWCCXNPACTXGXC

SEQ ID NO: 5666 - protein, 16 aa, Artificial Sequence
  Synthetically generated peptide
  VARIANT (1)..(16): Xaa = Any Amino Acid
CCEXWCCXNPACTGXC

SEQ ID NO: 5667 - protein, 17 aa, Artificial Sequence
  Synthetically generated peptide
  VARIANT (1)..(17): Xaa = Any Amino Acid
CCEXWCCXNPACTGXXC

SEQ ID NO: 5668 - protein, 15 aa, Artificial Sequence
  Synthetically generated peptide
  VARIANT (1)..(15): Xaa = Any Amino Acid
CCEXWCCNXPACTGC

SEQ ID NO: 5669 - protein, 16 aa, Artificial Sequence
  Synthetically generated peptide
  VARIANT (1)..(16): Xaa = Any Amino Acid
CCEXWCCNXXPACTGC

SEQ ID NO: 5670 - protein, 17 aa, Artificial Sequence
  Synthetically generated peptide
  VARIANT (1)..(17): Xaa = Any Amino Acid
CCEXWCCNXXXPACTGC

SEQ ID NO: 5671 - protein, 17 aa, Artificial Sequence
  Synthetically generated peptide
  VARIANT (1)..(17): Xaa = Any Amino Acid
CCEXWCCNXXPXACTGC

SEQ ID NO: 5672 - protein, 17 aa, Artificial Sequence
  Synthetically generated peptide
  VARIANT (1)..(17): Xaa = Any Amino Acid
CCEXWCCNXXPAXCTGC

SEQ ID NO: 5673 - protein, 17 aa, Artificial Sequence
  Synthetically generated peptide
  VARIANT (1)..(17): Xaa = Any Amino Acid
CCEXWCCNXXPACXTGC

SEQ ID NO: 5674 - protein, 17 aa, Artificial Sequence
  Synthetically generated peptide
  VARIANT (1)..(17): Xaa = Any Amino Acid
CCEXWCCNXXPACTXGC

SEQ ID NO: 5675 - protein, 17 aa, Artificial Sequence
  Synthetically generated peptide
  VARIANT (1)..(17): Xaa = Any Amino Acid
CCEXWCCNXXPACTGXC

SEQ ID NO: 5676 - protein, 16 aa, Artificial Sequence
  Synthetically generated peptide
  VARIANT (1)..(16): Xaa = Any Amino Acid
CCEXWCCNXPXACTGC

SEQ ID NO: 5677 - protein, 17 aa, Artificial Sequence
  Synthetically generated peptide
  VARIANT (1)..(17): Xaa = Any Amino Acid
CCEXWCCNXPXXACTGC

SEQ ID NO: 5678 - protein, 17 aa, Artificial Sequence
  Synthetically generated peptide
  VARIANT (1)..(17): Xaa = Any Amino Acid
CCEXWCCNXPXAXCTGC

SEQ ID NO: 5679 - protein, 17 aa, Artificial Sequence
  Synthetically generated peptide
  VARIANT (1)..(17): Xaa = Any Amino Acid
CCEXWCCNXPXACXTGC

SEQ ID NO: 5680 - protein, 17 aa, Artificial Sequence
  Synthetically generated peptide
  VARIANT (1)..(17): Xaa = Any Amino Acid
CCEXWCCNXPXACTXGC

SEQ ID NO: 5681 - protein, 17 aa, Artificial Sequence
  Synthetically generated peptide
  VARIANT (1)..(17): Xaa = Any Amino Acid
CCEXWCCNXPXACTGXC

SEQ ID NO: 5682 - protein, 16 aa, Artificial Sequence
  Synthetically generated peptide
  VARIANT (1)..(16): Xaa = Any Amino Acid
CCEXWCCNXPAXCTGC

SEQ ID NO: 5683 - protein, 17 aa, Artificial Sequence
  Synthetically generated peptide
  VARIANT (1)..(17): Xaa = Any Amino Acid
CCEXWCCNXPAXXCTGC

SEQ ID NO: 5684 - protein, 17 aa, Artificial Sequence
  Synthetically generated peptide
  VARIANT (1)..(17): Xaa = Any Amino Acid
CCEXWCCNXPAXCXTGC

SEQ ID NO: 5685 - protein, 17 aa, Artificial Sequence
  Synthetically generated peptide
  VARIANT (1)..(17): Xaa = Any Amino Acid
CCEXWCCNXPAXCTXGC

SEQ ID NO: 5686 - protein, 17 aa, Artificial Sequence
  Synthetically generated peptide
  VARIANT (1)..(17): Xaa = Any Amino Acid
CCEXWCCNXPAXCTGXC

SEQ ID NO: 5687 - protein, 16 aa, Artificial Sequence
  Synthetically generated peptide
  VARIANT (1)..(16): Xaa = Any Amino Acid
CCEXWCCNXPACXTGC

SEQ ID NO: 5688 - protein, 17 aa, Artificial Sequence
  Synthetically generated peptide
  VARIANT (1)..(17): Xaa = Any Amino Acid
CCEXWCCNXPACXXTGC

SEQ ID NO: 5689 - protein, 17 aa, Artificial Sequence
  Synthetically generated peptide
  VARIANT (1)..(17): Xaa = Any Amino Acid
CCEXWCCNXPACXTXGC

SEQ ID NO: 5690 - protein, 17 aa, Artificial Sequence
  Synthetically generated peptide
  VARIANT (1)..(17): Xaa = Any Amino Acid
CCEXWCCNXPACXTGXC

SEQ ID NO: 5691 - protein, 16 aa, Artificial Sequence
  Synthetically generated peptide
  VARIANT (1)..(16): Xaa = Any Amino Acid
CCEXWCCNXPACTXGC

SEQ ID NO: 5692 - protein, 17 aa, Artificial Sequence
  Synthetically generated peptide
  VARIANT (1)..(17): Xaa = Any Amino Acid
CCEXWCCNXPACTXXGC

SEQ ID NO: 5693 - protein, 17 aa, Artificial Sequence
  Synthetically generated peptide
  VARIANT (1)..(17): Xaa = Any Amino Acid
CCEXWCCNXPACTXGXC

SEQ ID NO: 5694 - protein, 16 aa, Artificial Sequence
  Synthetically generated peptide
  VARIANT (1)..(16): Xaa = Any Amino Acid
CCEXWCCNXPACTGXC

SEQ ID NO: 5695 - protein, 17 aa, Artificial Sequence
  Synthetically generated peptide
  VARIANT (1)..(17): Xaa = Any Amino Acid
CCEXWCCNXPACTGXXC

SEQ ID NO: 5696 - protein, 15 aa, Artificial Sequence
  Synthetically generated peptide
  VARIANT (1)..(15): Xaa = Any Amino Acid
CCEXWCCNPXACTGC

SEQ ID NO: 5697 - protein, 16 aa, Artificial Sequence
  Synthetically generated peptide
  VARIANT (1)..(16): Xaa = Any Amino Acid
CCEXWCCNPXXACTGC

SEQ ID NO: 5698 - protein, 17 aa, Artificial Sequence
  Synthetically generated peptide
  VARIANT (1)..(17): Xaa = Any Amino Acid
CCEXWCCNPXXXACTGC

SEQ ID NO: 5699 - protein, 17 aa, Artificial Sequence
  Synthetically generated peptide
  VARIANT (1)..(17): Xaa = Any Amino Acid
CCEXWCCNPXXAXCTGC

SEQ ID NO: 5700 - protein, 17 aa, Artificial Sequence
  Synthetically generated peptide
  VARIANT (1)..(17): Xaa = Any Amino Acid
CCEXWCCNPXXACXTGC

SEQ ID NO: 5701 - protein, 17 aa, Artificial Sequence
  Synthetically generated peptide
  VARIANT (1)..(17): Xaa = Any Amino Acid
CCEXWCCNPXXACTXGC

SEQ ID NO: 5702 - protein, 17 aa, Artificial Sequence
  Synthetically generated peptide
  VARIANT (1)..(17): Xaa = Any Amino Acid
CCEXWCCNPXXACTGXC

SEQ ID NO: 5703 - protein, 16 aa, Artificial Sequence
  Synthetically generated peptide
  VARIANT (1)..(16): Xaa = Any Amino Acid
CCEXWCCNPXAXCTGC

SEQ ID NO: 5704 - protein, 17 aa, Artificial Sequence
  Synthetically generated peptide
  VARIANT (1)..(17): Xaa = Any Amino Acid
CCEXWCCNPXAXXCTGC

SEQ ID NO: 5705 - protein, 17 aa, Artificial Sequence
  Synthetically generated peptide
  VARIANT (1)..(17): Xaa = Any Amino Acid
CCEXWCCNPXAXCXTGC

SEQ ID NO: 5706 - protein, 17 aa, Artificial Sequence
  Synthetically generated peptide
  VARIANT (1)..(17): Xaa = Any Amino Acid
CCEXWCCNPXAXCTXGC

SEQ ID NO: 5707 - protein, 17 aa, Artificial Sequence
  Synthetically generated peptide
  VARIANT (1)..(17): Xaa = Any Amino Acid
CCEXWCCNPXAXCTGXC

SEQ ID NO: 5708 - protein, 16 aa, Artificial Sequence
  Synthetically generated peptide
  VARIANT (1)..(16): Xaa = Any Amino Acid
CCEXWCCNPXACXTGC

SEQ ID NO: 5709 - protein, 17 aa, Artificial Sequence
  Synthetically generated peptide
  VARIANT (1)..(17): Xaa = Any Amino Acid
CCEXWCCNPXACXXTGC

SEQ ID NO: 5710 - protein, 17 aa, Artificial Sequence
  Synthetically generated peptide
  VARIANT (1)..(17): Xaa = Any Amino Acid
CCEXWCCNPXACXTXGC

SEQ ID NO: 5711 - protein, 17 aa, Artificial Sequence
  Synthetically generated peptide
  VARIANT (1)..(17): Xaa = Any Amino Acid
CCEXWCCNPXACXTGXC

SEQ ID NO: 5712 - protein, 16 aa, Artificial Sequence
  Synthetically generated peptide
  VARIANT (1)..(16): Xaa = Any Amino Acid
CCEXWCCNPXACTXGC

SEQ ID NO: 5713 - protein, 17 aa, Artificial Sequence
  Synthetically generated peptide
  VARIANT (1)..(17): Xaa = Any Amino Acid
CCEXWCCNPXACTXXGC

SEQ ID NO: 5714 - protein, 17 aa, Artificial Sequence
  Synthetically generated peptide
  VARIANT (1)..(17): Xaa = Any Amino Acid
CCEXWCCNPXACTXGXC

SEQ ID NO: 5715 - protein, 16 aa, Artificial Sequence
  Synthetically generated peptide
  VARIANT (1)..(16): Xaa = Any Amino Acid
CCEXWCCNPXACTGXC

SEQ ID NO: 5716 - protein, 17 aa, Artificial Sequence
  Synthetically generated peptide
  VARIANT (1)..(17): Xaa = Any Amino Acid
CCEXWCCNPXACTGXXC

SEQ ID NO: 5717 - protein, 15 aa, Artificial Sequence
  Synthetically generated peptide
  VARIANT (1)..(15): Xaa = Any Amino Acid
CCEXWCCNPAXCTGC

SEQ ID NO: 5718 - protein, 16 aa, Artificial Sequence
  Synthetically generated peptide
  VARIANT (1)..(16): Xaa = Any Amino Acid
CCEXWCCNPAXXCTGC

SEQ ID NO: 5719 - protein, 17 aa, Artificial Sequence
  Synthetically generated peptide
  VARIANT (1)..(17): Xaa = Any Amino Acid
CCEXWCCNPAXXXCTGC

SEQ ID NO: 5720 - protein, 17 aa, Artificial Sequence
  Synthetically generated peptide
  VARIANT (1)..(17): Xaa = Any Amino Acid
CCEXWCCNPAXXCXTGC

SEQ ID NO: 5721 - protein, 17 aa, Artificial Sequence
  Synthetically generated peptide
  VARIANT (1)..(17): Xaa = Any Amino Acid
CCEXWCCNPAXXCTXGC

SEQ ID NO: 5722 - protein, 17 aa, Artificial Sequence
  Synthetically generated peptide
  VARIANT (1)..(17): Xaa = Any Amino Acid
CCEXWCCNPAXXCTGXC

SEQ ID NO: 5723 - protein, 16 aa, Artificial Sequence
  Synthetically generated peptide
  VARIANT (1)..(16): Xaa = Any Amino Acid
CCEXWCCNPAXCXTGC

SEQ ID NO: 5724 - protein, 17 aa, Artificial Sequence
  Synthetically generated peptide
  VARIANT (1)..(17): Xaa = Any Amino Acid
CCEXWCCNPAXCXXTGC

SEQ ID NO: 5725 - protein, 17 aa, Artificial Sequence
  Synthetically generated peptide
  VARIANT (1)..(17): Xaa = Any Amino Acid
CCEXWCCNPAXCXTXGC

SEQ ID NO: 5726 - protein, 17 aa, Artificial Sequence
  Synthetically generated peptide
  VARIANT (1)..(17): Xaa = Any Amino Acid
CCEXWCCNPAXCXTGXC

SEQ ID NO: 5727 - protein, 16 aa, Artificial Sequence
  Synthetically generated peptide
  VARIANT (1)..(16): Xaa = Any Amino Acid
CCEXWCCNPAXCTXGC

SEQ ID NO: 5728 - protein, 17 aa, Artificial Sequence
  Synthetically generated peptide
  VARIANT (1)..(17): Xaa = Any Amino Acid
CCEXWCCNPAXCTXXGC

SEQ ID NO: 5729 - protein, 17 aa, Artificial Sequence
  Synthetically generated peptide
  VARIANT (1)..(17): Xaa = Any Amino Acid
CCEXWCCNPAXCTXGXC

SEQ ID NO: 5730 - protein, 16 aa, Artificial Sequence
  Synthetically generated peptide
  VARIANT (1)..(16): Xaa = Any Amino Acid
CCEXWCCNPAXCTGXC

SEQ ID NO: 5731 - protein, 17 aa, Artificial Sequence
  Synthetically generated peptide
  VARIANT (1)..(17): Xaa = Any Amino Acid
CCEXWCCNPAXCTGXXC

SEQ ID NO: 5732 - protein, 15 aa, Artificial Sequence
  Synthetically generated peptide
  VARIANT (1)..(15): Xaa = Any Amino Acid
CCEXWCCNPACXTGC

SEQ ID NO: 5733 - protein, 16 aa, Artificial Sequence
  Synthetically generated peptide
  VARIANT (1)..(16): Xaa = Any Amino Acid
CCEXWCCNPACXXTGC

SEQ ID NO: 5734 - protein, 17 aa, Artificial Sequence
  Synthetically generated peptide
  VARIANT (1)..(17): Xaa = Any Amino Acid
CCEXWCCNPACXXXTGC

SEQ ID NO: 5735 - protein, 17 aa, Artificial Sequence
  Synthetically generated peptide
  VARIANT (1)..(17): Xaa = Any Amino Acid
CCEXWCCNPACXXTXGC

SEQ ID NO: 5736 - protein, 17 aa, Artificial Sequence
  Synthetically generated peptide
  VARIANT (1)..(17): Xaa = Any Amino Acid
CCEXWCCNPACXXTGXC

SEQ ID NO: 5737 - protein, 16 aa, Artificial Sequence
  Synthetically generated peptide
  VARIANT (1)..(16): Xaa = Any Amino Acid
CCEXWCCNPACXTXGC

SEQ ID NO: 5738 - protein, 17 aa, Artificial Sequence
  Synthetically generated peptide
  VARIANT (1)..(17): Xaa = Any Amino Acid
CCEXWCCNPACXTXXGC

SEQ ID NO: 5739 - protein, 17 aa, Artificial Sequence
  Synthetically generated peptide
  VARIANT (1)..(17): Xaa = Any Amino Acid
CCEXWCCNPACXTXGXC

SEQ ID NO: 5740 - protein, 16 aa, Artificial Sequence
  Synthetically generated peptide
  VARIANT (1)..(16): Xaa = Any Amino Acid
CCEXWCCNPACXTGXC

SEQ ID NO: 5741 - protein, 17 aa, Artificial Sequence
  Synthetically generated peptide
  VARIANT (1)..(17): Xaa = Any Amino Acid
CCEXWCCNPACXTGXXC

SEQ ID NO: 5742 - protein, 15 aa, Artificial Sequence
  Synthetically generated peptide
  VARIANT (1)..(15): Xaa = Any Amino Acid
CCEXWCCNPACTXGC

SEQ ID NO: 5743 - protein, 16 aa, Artificial Sequence
  Synthetically generated peptide
  VARIANT (1)..(16): Xaa = Any Amino Acid
CCEXWCCNPACTXXGC

SEQ ID NO: 5744 - protein, 17 aa, Artificial Sequence
  Synthetically generated peptide
  VARIANT (1)..(17): Xaa = Any Amino Acid
CCEXWCCNPACTXXXGC

SEQ ID NO: 5745 - protein, 17 aa, Artificial Sequence
  Synthetically generated peptide
  VARIANT (1)..(17): Xaa = Any Amino Acid
CCEXWCCNPACTXXGXC

SEQ ID NO: 5746 - protein, 16 aa, Artificial Sequence
  Synthetically generated peptide
  VARIANT (1)..(16): Xaa = Any Amino Acid
CCEXWCCNPACTXGXC

SEQ ID NO: 5747 - protein, 17 aa, Artificial Sequence
  Synthetically generated peptide
  VARIANT (1)..(17): Xaa = Any Amino Acid
CCEXWCCNPACTXGXXC

SEQ ID NO: 5748 - protein, 15 aa, Artificial Sequence
  Synthetically generated peptide
  VARIANT (1)..(15): Xaa = Any Amino Acid
CCEXWCCNPACTGXC

SEQ ID NO: 5749 - protein, 16 aa, Artificial Sequence
  Synthetically generated peptide
  VARIANT (1)..(16): Xaa = Any Amino Acid
CCEXWCCNPACTGXXC

SEQ ID NO: 5750 - protein, 17 aa, Artificial Sequence
  Synthetically generated peptide
  VARIANT (1)..(17): Xaa = Any Amino Acid
CCEXWCCNPACTGXXXC

SEQ ID NO: 5751 - protein, 14 aa, Artificial Sequence
  Synthetically generated peptide
  VARIANT (1)..(14): Xaa = Any Amino Acid
CCEWXCCNPACTGC

SEQ ID NO: 5752 - protein, 15 aa, Artificial Sequence
  Synthetically generated peptide
  VARIANT (1)..(15): Xaa = Any Amino Acid
CCEWXXCCNPACTGC

SEQ ID NO: 5753 - protein, 16 aa, Artificial Sequence
  Synthetically generated peptide
  VARIANT (1)..(16): Xaa = Any Amino Acid
CCEWXXXCCNPACTGC

SEQ ID NO: 5754 - protein, 17 aa, Artificial Sequence
  Synthetically generated peptide
  VARIANT (1)..(17): Xaa = Any Amino Acid
CCEWXXXXCCNPACTGC

SEQ ID NO: 5755 - protein, 17 aa, Artificial Sequence
  Synthetically generated peptide
  VARIANT (1)..(17): Xaa = Any Amino Acid
CCEWXXXCCXNPACTGC

SEQ ID NO: 5756 - protein, 17 aa, Artificial Sequence
  Synthetically generated peptide
  VARIANT (1)..(17): Xaa = Any Amino Acid
CCEWXXXCCNXPACTGC

SEQ ID NO: 5757 - protein, 17 aa, Artificial Sequence
  Synthetically generated peptide
  VARIANT (1)..(17): Xaa = Any Amino Acid
CCEWXXXCCNPXACTGC

SEQ ID NO: 5758 - protein, 17 aa, Artificial Sequence
  Synthetically generated peptide
  VARIANT (1)..(17): Xaa = Any Amino Acid
CCEWXXXCCNPAXCTGC

SEQ ID NO: 5759 - protein, 17 aa, Artificial Sequence
  Synthetically generated peptide
  VARIANT (1)..(17): Xaa = Any Amino Acid
CCEWXXXCCNPACXTGC

SEQ ID NO: 5760 - protein, 17 aa, Artificial Sequence
  Synthetically generated peptide
  VARIANT (1)..(17): Xaa = Any Amino Acid
CCEWXXXCCNPACTXGC

SEQ ID NO: 5761 - protein, 17 aa, Artificial Sequence
  Synthetically generated peptide
  VARIANT (1)..(17): Xaa = Any Amino Acid
CCEWXXXCCNPACTGXC

SEQ ID NO: 5762 - protein, 16 aa, Artificial Sequence
  Synthetically generated peptide
  VARIANT (1)..(16): Xaa = Any Amino Acid
CCEWXXCCXNPACTGC

SEQ ID NO: 5763 - protein, 17 aa, Artificial Sequence
  Synthetically generated peptide
  VARIANT (1)..(17): Xaa = Any Amino Acid
CCEWXXCCXXNPACTGC

SEQ ID NO: 5764 - protein, 17 aa, Artificial Sequence
  Synthetically generated peptide
  VARIANT (1)..(17): Xaa = Any Amino Acid
CCEWXXCCXNXPACTGC

SEQ ID NO: 5765 - protein, 17 aa, Artificial Sequence
  Synthetically generated peptide
  VARIANT (1)..(17): Xaa = Any Amino Acid
CCEWXXCCXNPXACTGC

SEQ ID NO: 5766 - protein, 17 aa, Artificial Sequence
  Synthetically generated peptide
  VARIANT (1)..(17): Xaa = Any Amino Acid
CCEWXXCCXNPAXCTGC

SEQ ID NO: 5767 - protein, 17 aa, Artificial Sequence
  Synthetically generated peptide
  VARIANT (1)..(17): Xaa = Any Amino Acid
CCEWXXCCXNPACXTGC

SEQ ID NO: 5768 - protein, 17 aa, Artificial Sequence
  Synthetically generated peptide
  VARIANT (1)..(17): Xaa = Any Amino Acid
CCEWXXCCXNPACTXGC

SEQ ID NO: 5769 - protein, 17 aa, Artificial Sequence
  Synthetically generated peptide
  VARIANT (1)..(17): Xaa = Any Amino Acid
CCEWXXCCXNPACTGXC

SEQ ID NO: 5770 - protein, 16 aa, Artificial Sequence
  Synthetically generated peptide
  VARIANT (1)..(16): Xaa = Any Amino Acid
CCEWXXCCNXPACTGC

SEQ ID NO: 5771 - protein, 17 aa, Artificial Sequence
  Synthetically generated peptide
  VARIANT (1)..(17): Xaa = Any Amino Acid
CCEWXXCCNXXPACTGC

SEQ ID NO: 5772 - protein, 17 aa, Artificial Sequence
  Synthetically generated peptide
  VARIANT (1)..(17): Xaa = Any Amino Acid
CCEWXXCCNXPXACTGC

SEQ ID NO: 5773 - protein, 17 aa, Artificial Sequence
  Synthetically generated peptide
  VARIANT (1)..(17): Xaa = Any Amino Acid
CCEWXXCCNXPAXCTGC

SEQ ID NO: 5774 - protein, 17 aa, Artificial Sequence
  Synthetically generated peptide
  VARIANT (1)..(17): Xaa = Any Amino Acid
CCEWXXCCNXPACXTGC

SEQ ID NO: 5775 - protein, 17 aa, Artificial Sequence
  Synthetically generated peptide
  VARIANT (1)..(17): Xaa = Any Amino Acid
CCEWXXCCNXPACTXGC

SEQ ID NO: 5776 - protein, 17 aa, Artificial Sequence
  Synthetically generated peptide
  VARIANT (1)..(17): Xaa = Any Amino Acid
CCEWXXCCNXPACTGXC

SEQ ID NO: 5777 - protein, 16 aa, Artificial Sequence
  Synthetically generated peptide
  VARIANT (1)..(16): Xaa = Any Amino Acid
CCEWXXCCNPXACTGC

SEQ ID NO: 5778 - protein, 17 aa, Artificial Sequence
  Synthetically generated peptide
  VARIANT (1)..(17): Xaa = Any Amino Acid
CCEWXXCCNPXXACTGC

SEQ ID NO: 5779 - protein, 17 aa, Artificial Sequence
  Synthetically generated peptide
  VARIANT (1)..(17): Xaa = Any Amino Acid
CCEWXXCCNPXAXCTGC

SEQ ID NO: 5780 - protein, 17 aa, Artificial Sequence
  Synthetically generated peptide
  VARIANT (1)..(17): Xaa = Any Amino Acid
CCEWXXCCNPXACXTGC

SEQ ID NO: 5781 - protein, 17 aa, Artificial Sequence
  Synthetically generated peptide
  VARIANT (1)..(17): Xaa = Any Amino Acid
CCEWXXCCNPXACTXGC

SEQ ID NO: 5782 - protein, 17 aa, Artificial Sequence
  Synthetically generated peptide
  VARIANT (1)..(17): Xaa = Any Amino Acid
CCEWXXCCNPXACTGXC

SEQ ID NO: 5783 - protein, 16 aa, Artificial Sequence
  Synthetically generated peptide
  VARIANT (1)..(16): Xaa = Any Amino Acid
CCEWXXCCNPAXCTGC

SEQ ID NO: 5784 - protein, 17 aa, Artificial Sequence
  Synthetically generated peptide
  VARIANT (1)..(17): Xaa = Any Amino Acid
CCEWXXCCNPAXXCTGC

SEQ ID NO: 5785 - protein, 17 aa, Artificial Sequence
  Synthetically generated peptide
  VARIANT (1)..(17): Xaa = Any Amino Acid
CCEWXXCCNPAXCXTGC

SEQ ID NO: 5786 - protein, 17 aa, Artificial Sequence
  Synthetically generated peptide
  VARIANT (1)..(17): Xaa = Any Amino Acid
CCEWXXCCNPAXCTXGC

SEQ ID NO: 5787 - protein, 17 aa, Artificial Sequence
  Synthetically generated peptide
  VARIANT (1)..(17): Xaa = Any Amino Acid
CCEWXXCCNPAXCTGXC

SEQ ID NO: 5788 - protein, 16 aa, Artificial Sequence
  Synthetically generated peptide
  VARIANT (1)..(16): Xaa = Any Amino Acid
CCEWXXCCNPACXTGC

SEQ ID NO: 5789 - protein, 17 aa, Artificial Sequence
  Synthetically generated peptide
  VARIANT (1)..(17): Xaa = Any Amino Acid
CCEWXXCCNPACXXTGC

SEQ ID NO: 5790 - protein, 17 aa, Artificial Sequence
  Synthetically generated peptide
  VARIANT (1)..(17): Xaa = Any Amino Acid
CCEWXXCCNPACXTXGC

SEQ ID NO: 5791 - protein, 17 aa, Artificial Sequence
  Synthetically generated peptide
  VARIANT (1)..(17): Xaa = Any Amino Acid
CCEWXXCCNPACXTGXC

SEQ ID NO: 5792 - protein, 16 aa, Artificial Sequence
  Synthetically generated peptide
  VARIANT (1)..(16): Xaa = Any Amino Acid
CCEWXXCCNPACTXGC

SEQ ID NO: 5793 - protein, 17 aa, Artificial Sequence
  Synthetically generated peptide
  VARIANT (1)..(17): Xaa = Any Amino Acid
CCEWXXCCNPACTXXGC

SEQ ID NO: 5794 - protein, 17 aa, Artificial Sequence
  Synthetically generated peptide
  VARIANT (1)..(17): Xaa = Any Amino Acid
CCEWXXCCNPACTXGXC

SEQ ID NO: 5795 - protein, 16 aa, Artificial Sequence
  Synthetically generated peptide
  VARIANT (1)..(16): Xaa = Any Amino Acid
CCEWXXCCNPACTGXC

SEQ ID NO: 5796 - protein, 17 aa, Artificial Sequence
  Synthetically generated peptide
  VARIANT (1)..(17): Xaa = Any Amino Acid
CCEWXXCCNPACTGXXC

SEQ ID NO: 5797 - protein, 15 aa, Artificial Sequence
  Synthetically generated peptide
  VARIANT (1)..(15): Xaa = Any Amino Acid
CCEWXCCXNPACTGC

SEQ ID NO: 5798 - protein, 16 aa, Artificial Sequence
  Synthetically generated peptide
  VARIANT (1)..(16): Xaa = Any Amino Acid
CCEWXCCXXNPACTGC

SEQ ID NO: 5799 - protein, 17 aa, Artificial Sequence
  Synthetically generated peptide
  VARIANT (1)..(17): Xaa = Any Amino Acid
CCEWXCCXXXNPACTGC

SEQ ID NO: 5800 - protein, 17 aa, Artificial Sequence
  Synthetically generated peptide
  VARIANT (1)..(17): Xaa = Any Amino Acid
CCEWXCCXXNXPACTGC

SEQ ID NO: 5801 - protein, 17 aa, Artificial Sequence
  Synthetically generated peptide
  VARIANT (1)..(17): Xaa = Any Amino Acid
CCEWXCCXXNPXACTGC

SEQ ID NO: 5802 - protein, 17 aa, Artificial Sequence
  Synthetically generated peptide
  VARIANT (1)..(17): Xaa = Any Amino Acid
CCEWXCCXXNPAXCTGC

SEQ ID NO: 5803 - protein, 17 aa, Artificial Sequence
  Synthetically generated peptide
  VARIANT (1)..(17): Xaa = Any Amino Acid
CCEWXCCXXNPACXTGC

SEQ ID NO: 5804 - protein, 17 aa, Artificial Sequence
  Synthetically generated peptide
  VARIANT (1)..(17): Xaa = Any Amino Acid
CCEWXCCXXNPACTXGC

SEQ ID NO: 5805 - protein, 17 aa, Artificial Sequence
  Synthetically generated peptide
  VARIANT (1)..(17): Xaa = Any Amino Acid
CCEWXCCXXNPACTGXC

SEQ ID NO: 5806 - protein, 16 aa, Artificial Sequence
  Synthetically generated peptide
  VARIANT (1)..(16): Xaa = Any Amino Acid
CCEWXCCXNXPACTGC

SEQ ID NO: 5807 - protein, 17 aa, Artificial Sequence
  Synthetically generated peptide
  VARIANT (1)..(17): Xaa = Any Amino Acid
CCEWXCCXNXXPACTGC

SEQ ID NO: 5808 - protein, 17 aa, Artificial Sequence
  Synthetically generated peptide
  VARIANT (1)..(17): Xaa = Any Amino Acid
CCEWXCCXNXPXACTGC

SEQ ID NO: 5809 - protein, 17 aa, Artificial Sequence
  Synthetically generated peptide
  VARIANT (1)..(17): Xaa = Any Amino Acid
CCEWXCCXNXPAXCTGC

SEQ ID NO: 5810 - protein, 17 aa, Artificial Sequence
  Synthetically generated peptide
  VARIANT (1)..(17): Xaa = Any Amino Acid
CCEWXCCXNXPACXTGC

SEQ ID NO: 5811 - protein, 17 aa, Artificial Sequence
  Synthetically generated peptide
  VARIANT (1)..(17): Xaa = Any Amino Acid
CCEWXCCXNXPACTXGC

SEQ ID NO: 5812 - protein, 17 aa, Artificial Sequence
  Synthetically generated peptide
  VARIANT (1)..(17): Xaa = Any Amino Acid
CCEWXCCXNXPACTGXC

SEQ ID NO: 5813 - protein, 16 aa, Artificial Sequence
  Synthetically generated peptide
  VARIANT (1)..(16): Xaa = Any Amino Acid
CCEWXCCXNPXACTGC

SEQ ID NO: 5814 - protein, 17 aa, Artificial Sequence
  Synthetically generated peptide
  VARIANT (1)..(17): Xaa = Any Amino Acid
CCEWXCCXNPXXACTGC

SEQ ID NO: 5815 - protein, 17 aa, Artificial Sequence
  Synthetically generated peptide
  VARIANT (1)..(17): Xaa = Any Amino Acid
CCEWXCCXNPXAXCTGC

SEQ ID NO: 5816 - protein, 17 aa, Artificial Sequence
  Synthetically generated peptide
  VARIANT (1)..(17): Xaa = Any Amino Acid
CCEWXCCXNPXACXTGC

SEQ ID NO: 5817 - protein, 17 aa, Artificial Sequence
  Synthetically generated peptide
  VARIANT (1)..(17): Xaa = Any Amino Acid
CCEWXCCXNPXACTXGC

SEQ ID NO: 5818 - protein, 17 aa, Artificial Sequence
  Synthetically generated peptide
  VARIANT (1)..(17): Xaa = Any Amino Acid
CCEWXCCXNPXACTGXC

SEQ ID NO: 5819 - protein, 16 aa, Artificial Sequence
  Synthetically generated peptide
  VARIANT (1)..(16): Xaa = Any Amino Acid
CCEWXCCXNPAXCTGC

SEQ ID NO: 5820 - protein, 17 aa, Artificial Sequence
  Synthetically generated peptide
  VARIANT (1)..(17): Xaa = Any Amino Acid
CCEWXCCXNPAXXCTGC

SEQ ID NO: 5821 - protein, 17 aa, Artificial Sequence
  Synthetically generated peptide
  VARIANT (1)..(17): Xaa = Any Amino Acid
CCEWXCCXNPAXCXTGC

SEQ ID NO: 5822 - protein, 17 aa, Artificial Sequence
  Synthetically generated peptide
  VARIANT (1)..(17): Xaa = Any Amino Acid
CCEWXCCXNPAXCTXGC

SEQ ID NO: 5823 - protein, 17 aa, Artificial Sequence
  Synthetically generated peptide
  VARIANT (1)..(17): Xaa = Any Amino Acid
CCEWXCCXNPAXCTGXC

SEQ ID NO: 5824 - protein, 16 aa, Artificial Sequence
  Synthetically generated peptide
  VARIANT (1)..(16): Xaa = Any Amino Acid
CCEWXCCXNPACXTGC

SEQ ID NO: 5825 - protein, 17 aa, Artificial Sequence
  Synthetically generated peptide
  VARIANT (1)..(17): Xaa = Any Amino Acid
CCEWXCCXNPACXXTGC

SEQ ID NO: 5826 - protein, 17 aa, Artificial Sequence
  Synthetically generated peptide
  VARIANT (1)..(17): Xaa = Any Amino Acid
CCEWXCCXNPACXTXGC

SEQ ID NO: 5827 - protein, 17 aa, Artificial Sequence
  Synthetically generated peptide
  VARIANT (1)..(17): Xaa = Any Amino Acid
CCEWXCCXNPACXTGXC

SEQ ID NO: 5828 - protein, 16 aa, Artificial Sequence
  Synthetically generated peptide
  VARIANT (1)..(16): Xaa = Any Amino Acid
CCEWXCCXNPACTXGC

SEQ ID NO: 5829 - protein, 17 aa, Artificial Sequence
  Synthetically generated peptide
  VARIANT (1)..(17): Xaa = Any Amino Acid
CCEWXCCXNPACTXXGC

SEQ ID NO: 5830 - protein, 17 aa, Artificial Sequence
  Synthetically generated peptide
  VARIANT (1)..(17): Xaa = Any Amino Acid
CCEWXCCXNPACTXGXC

SEQ ID NO: 5831 - protein, 16 aa, Artificial Sequence
  Synthetically generated peptide
  VARIANT (1)..(16): Xaa = Any Amino Acid
CCEWXCCXNPACTGXC

SEQ ID NO: 5832 - protein, 17 aa, Artificial Sequence
  Synthetically generated peptide
  VARIANT (1)..(17): Xaa = Any Amino Acid
CCEWXCCXNPACTGXXC

SEQ ID NO: 5833 - protein, 15 aa, Artificial Sequence
  Synthetically generated peptide
  VARIANT (1)..(15): Xaa = Any Amino Acid
CCEWXCCNXPACTGC

SEQ ID NO: 5834 - protein, 16 aa, Artificial Sequence
  Synthetically generated peptide
  VARIANT (1)..(16): Xaa = Any Amino Acid
CCEWXCCNXXPACTGC

SEQ ID NO: 5835 - protein, 17 aa, Artificial Sequence
  Synthetically generated peptide
  VARIANT (1)..(17): Xaa = Any Amino Acid
CCEWXCCNXXXPACTGC

SEQ ID NO: 5836 - protein, 17 aa, Artificial Sequence
  Synthetically generated peptide
  VARIANT (1)..(17): Xaa = Any Amino Acid
CCEWXCCNXXPXACTGC

SEQ ID NO: 5837 - protein, 17 aa, Artificial Sequence
  Synthetically generated peptide
  VARIANT (1)..(17): Xaa = Any Amino Acid
CCEWXCCNXXPAXCTGC

SEQ ID NO: 5838 - protein, 17 aa, Artificial Sequence
  Synthetically generated peptide
  VARIANT (1)..(17): Xaa = Any Amino Acid
CCEWXCCNXXPACXTGC

SEQ ID NO: 5839 - protein, 17 aa, Artificial Sequence
  Synthetically generated peptide
  VARIANT (1)..(17): Xaa = Any Amino Acid
CCEWXCCNXXPACTXGC

SEQ ID NO: 5840 - protein, 17 aa, Artificial Sequence
  Synthetically generated peptide
  VARIANT (1)..(17): Xaa = Any Amino Acid
CCEWXCCNXXPACTGXC

SEQ ID NO: 5841 - protein, 16 aa, Artificial Sequence
  Synthetically generated peptide
  VARIANT (1)..(16): Xaa = Any Amino Acid
CCEWXCCNXPXACTGC

SEQ ID NO: 5842 - protein, 17 aa, Artificial Sequence
  Synthetically generated peptide
  VARIANT (1)..(17): Xaa = Any Amino Acid
CCEWXCCNXPXXACTGC

SEQ ID NO: 5843 - protein, 17 aa, Artificial Sequence
  Synthetically generated peptide
  VARIANT (1)..(17): Xaa = Any Amino Acid
CCEWXCCNXPXAXCTGC

SEQ ID NO: 5844 - protein, 17 aa, Artificial Sequence
  Synthetically generated peptide
  VARIANT (1)..(17): Xaa = Any Amino Acid
CCEWXCCNXPXACXTGC

SEQ ID NO: 5845 - protein, 17 aa, Artificial Sequence
  Synthetically generated peptide
  VARIANT (1)..(17): Xaa = Any Amino Acid
CCEWXCCNXPXACTXGC

SEQ ID NO: 5846 - protein, 17 aa, Artificial Sequence
  Synthetically generated peptide
  VARIANT (1)..(17): Xaa = Any Amino Acid
CCEWXCCNXPXACTGXC

SEQ ID NO: 5847 - protein, 16 aa, Artificial Sequence
  Synthetically generated peptide
  VARIANT (1)..(16): Xaa = Any Amino Acid
CCEWXCCNXPAXCTGC

SEQ ID NO: 5848 - protein, 17 aa, Artificial Sequence
  Synthetically generated peptide
  VARIANT (1)..(17): Xaa = Any Amino Acid
CCEWXCCNXPAXXCTGC

SEQ ID NO: 5849 - protein, 17 aa, Artificial Sequence
  Synthetically generated peptide
  VARIANT (1)..(17): Xaa = Any Amino Acid
CCEWXCCNXPAXCXTGC

SEQ ID NO: 5850 - protein, 17 aa, Artificial Sequence
  Synthetically generated peptide
  VARIANT (1)..(17): Xaa = Any Amino Acid
CCEWXCCNXPAXCTXGC

SEQ ID NO: 5851 - protein, 17 aa, Artificial Sequence
  Synthetically generated peptide
  VARIANT (1)..(17): Xaa = Any Amino Acid
CCEWXCCNXPAXCTGXC

SEQ ID NO: 5852 - protein, 16 aa, Artificial Sequence
  Synthetically generated peptide
  VARIANT (1)..(16): Xaa = Any Amino Acid
CCEWXCCNXPACXTGC

SEQ ID NO: 5853 - protein, 17 aa, Artificial Sequence
  Synthetically generated peptide
  VARIANT (1)..(17): Xaa = Any Amino Acid
CCEWXCCNXPACXXTGC

SEQ ID NO: 5854 - protein, 17 aa, Artificial Sequence
  Synthetically generated peptide
  VARIANT (1)..(17): Xaa = Any Amino Acid
CCEWXCCNXPACXTXGC

SEQ ID NO: 5855 - protein, 17 aa, Artificial Sequence
  Synthetically generated peptide
  VARIANT (1)..(17): Xaa = Any Amino Acid
CCEWXCCNXPACXTGXC

SEQ ID NO: 5856 - protein, 16 aa, Artificial Sequence
  Synthetically generated peptide
  VARIANT (1)..(16): Xaa = Any Amino Acid
CCEWXCCNXPACTXGC

SEQ ID NO: 5857 - protein, 17 aa, Artificial Sequence
  Synthetically generated peptide
  VARIANT (1)..(17): Xaa = Any Amino Acid
CCEWXCCNXPACTXXGC

SEQ ID NO: 5858 - protein, 17 aa, Artificial Sequence
  Synthetically generated peptide
  VARIANT (1)..(17): Xaa = Any Amino Acid
CCEWXCCNXPACTXGXC

SEQ ID NO: 5859 - protein, 16 aa, Artificial Sequence
  Synthetically generated peptide
  VARIANT (1)..(16): Xaa = Any Amino Acid
CCEWXCCNXPACTGXC

SEQ ID NO: 5860 - protein, 17 aa, Artificial Sequence
  Synthetically generated peptide
  VARIANT (1)..(17): Xaa = Any Amino Acid
CCEWXCCNXPACTGXXC

SEQ ID NO: 5861 - protein, 15 aa, Artificial Sequence
  Synthetically generated peptide
  VARIANT (1)..(15): Xaa = Any Amino Acid
CCEWXCCNPXACTGC

SEQ ID NO: 5862 - protein, 16 aa, Artificial Sequence
  Synthetically generated peptide
  VARIANT (1)..(16): Xaa = Any Amino Acid
CCEWXCCNPXXACTGC

SEQ ID NO: 5863 - protein, 17 aa, Artificial Sequence
  Synthetically generated peptide
  VARIANT (1)..(17): Xaa = Any Amino Acid
CCEWXCCNPXXXACTGC

SEQ ID NO: 5864 - protein, 17 aa, Artificial Sequence
  Synthetically generated peptide
  VARIANT (1)..(17): Xaa = Any Amino Acid
CCEWXCCNPXXAXCTGC

SEQ ID NO: 5865 - protein, 17 aa, Artificial Sequence
  Synthetically generated peptide
  VARIANT (1)..(17): Xaa = Any Amino Acid
CCEWXCCNPXXACXTGC

SEQ ID NO: 5866 - protein, 17 aa, Artificial Sequence
  Synthetically generated peptide
  VARIANT (1)..(17): Xaa = Any Amino Acid
CCEWXCCNPXXACTXGC

SEQ ID NO: 5867 - protein, 17 aa, Artificial Sequence
  Synthetically generated peptide
  VARIANT (1)..(17): Xaa = Any Amino Acid
CCEWXCCNPXXACTGXC

SEQ ID NO: 5868 - protein, 16 aa, Artificial Sequence
  Synthetically generated peptide
  VARIANT (1)..(16): Xaa = Any Amino Acid
CCEWXCCNPXAXCTGC

SEQ ID NO: 5869 - protein, 17 aa, Artificial Sequence
  Synthetically generated peptide
  VARIANT (1)..(17): Xaa = Any Amino Acid
CCEWXCCNPXAXXCTGC

SEQ ID NO: 5870 - protein, 17 aa, Artificial Sequence
  Synthetically generated peptide
  VARIANT (1)..(17): Xaa = Any Amino Acid
CCEWXCCNPXAXCXTGC

SEQ ID NO: 5871 - protein, 17 aa, Artificial Sequence
  Synthetically generated peptide
  VARIANT (1)..(17): Xaa = Any Amino Acid
CCEWXCCNPXAXCTXGC

SEQ ID NO: 5872 - protein, 17 aa, Artificial Sequence
  Synthetically generated peptide
  VARIANT (1)..(17): Xaa = Any Amino Acid
CCEWXCCNPXAXCTGXC

SEQ ID NO: 5873 - protein, 16 aa, Artificial Sequence
  Synthetically generated peptide
  VARIANT (1)..(16): Xaa = Any Amino Acid
CCEWXCCNPXACXTGC

SEQ ID NO: 5874 - protein, 17 aa, Artificial Sequence
  Synthetically generated peptide
  VARIANT (1)..(17): Xaa = Any Amino Acid
CCEWXCCNPXACXXTGC

SEQ ID NO: 5875 - protein, 17 aa, Artificial Sequence
  Synthetically generated peptide
  VARIANT (1)..(17): Xaa = Any Amino Acid
CCEWXCCNPXACXTXGC

SEQ ID NO: 5876 - protein, 17 aa, Artificial Sequence
  Synthetically generated peptide
  VARIANT (1)..(17): Xaa = Any Amino Acid
CCEWXCCNPXACXTGXC

SEQ ID NO: 5877 - protein, 16 aa, Artificial Sequence
  Synthetically generated peptide
  VARIANT (1)..(16): Xaa = Any Amino Acid
CCEWXCCNPXACTXGC

SEQ ID NO: 5878 - protein, 17 aa, Artificial Sequence
  Synthetically generated peptide
  VARIANT (1)..(17): Xaa = Any Amino Acid
CCEWXCCNPXACTXXGC

SEQ ID NO: 5879 - protein, 17 aa, Artificial Sequence
  Synthetically generated peptide
  VARIANT (1)..(17): Xaa = Any Amino Acid
CCEWXCCNPXACTXGXC

SEQ ID NO: 5880 - protein, 16 aa, Artificial Sequence
  Synthetically generated peptide
  VARIANT (1)..(16): Xaa = Any Amino Acid
CCEWXCCNPXACTGXC

SEQ ID NO: 5881 - protein, 17 aa, Artificial Sequence
  Synthetically generated peptide
  VARIANT (1)..(17): Xaa = Any Amino Acid
CCEWXCCNPXACTGXXC

SEQ ID NO: 5882 - protein, 15 aa, Artificial Sequence
  Synthetically generated peptide
  VARIANT (1)..(15): Xaa = Any Amino Acid
CCEWXCCNPAXCTGC

SEQ ID NO: 5883 - protein, 16 aa, Artificial Sequence
  Synthetically generated peptide
  VARIANT (1)..(16): Xaa = Any Amino Acid
CCEWXCCNPAXXCTGC

SEQ ID NO: 5884 - protein, 17 aa, Artificial Sequence
  Synthetically generated peptide
  VARIANT (1)..(17): Xaa = Any Amino Acid
CCEWXCCNPAXXXCTGC

SEQ ID NO: 5885 - protein, 17 aa, Artificial Sequence
  Synthetically generated peptide
  VARIANT (1)..(17): Xaa = Any Amino Acid
CCEWXCCNPAXXCXTGC

SEQ ID NO: 5886 - protein, 17 aa, Artificial Sequence
  Synthetically generated peptide
  VARIANT (1)..(17): Xaa = Any Amino Acid
CCEWXCCNPAXXCTXGC

SEQ ID NO: 5887 - protein, 17 aa, Artificial Sequence
  Synthetically generated peptide
  VARIANT (1)..(17): Xaa = Any Amino Acid
CCEWXCCNPAXXCTGXC

SEQ ID NO: 5888 - protein, 16 aa, Artificial Sequence
  Synthetically generated peptide
  VARIANT (1)..(16): Xaa = Any Amino Acid
CCEWXCCNPAXCXTGC

SEQ ID NO: 5889 - protein, 17 aa, Artificial Sequence
  Synthetically generated peptide
  VARIANT (1)..(17): Xaa = Any Amino Acid
CCEWXCCNPAXCXXTGC

SEQ ID NO: 5890 - protein, 17 aa, Artificial Sequence
  Synthetically generated peptide
  VARIANT (1)..(17): Xaa = Any Amino Acid
CCEWXCCNPAXCXTXGC

SEQ ID NO: 5891 - protein, 17 aa, Artificial Sequence
  Synthetically generated peptide
  VARIANT (1)..(17): Xaa = Any Amino Acid
CCEWXCCNPAXCXTGXC

SEQ ID NO: 5892 - protein, 16 aa, Artificial Sequence
  Synthetically generated peptide
  VARIANT (1)..(16): Xaa = Any Amino Acid
CCEWXCCNPAXCTXGC

SEQ ID NO: 5893 - protein, 17 aa, Artificial Sequence
  Synthetically generated peptide
  VARIANT (1)..(17): Xaa = Any Amino Acid
CCEWXCCNPAXCTXXGC

SEQ ID NO: 5894 - protein, 17 aa, Artificial Sequence
  Synthetically generated peptide
  VARIANT (1)..(17): Xaa = Any Amino Acid
CCEWXCCNPAXCTXGXC

SEQ ID NO: 5895 - protein, 16 aa, Artificial Sequence
  Synthetically generated peptide
  VARIANT (1)..(16): Xaa = Any Amino Acid
CCEWXCCNPAXCTGXC

SEQ ID NO: 5896 - protein, 17 aa, Artificial Sequence
  Synthetically generated peptide
  VARIANT (1)..(17): Xaa = Any Amino Acid
CCEWXCCNPAXCTGXXC

SEQ ID NO: 5897 - protein, 15 aa, Artificial Sequence
  Synthetically generated peptide
  VARIANT (1)..(15): Xaa = Any Amino Acid
CCEWXCCNPACXTGC

SEQ ID NO: 5898 - protein, 16 aa, Artificial Sequence
  Synthetically generated peptide
  VARIANT (1)..(16): Xaa = Any Amino Acid
CCEWXCCNPACXXTGC

SEQ ID NO: 5899 - protein, 17 aa, Artificial Sequence
  Synthetically generated peptide
  VARIANT (1)..(17): Xaa = Any Amino Acid
CCEWXCCNPACXXXTGC

SEQ ID NO: 5900 - protein, 17 aa, Artificial Sequence
  Synthetically generated peptide
  VARIANT (1)..(17): Xaa = Any Amino Acid
CCEWXCCNPACXXTXGC

SEQ ID NO: 5901 - protein, 17 aa, Artificial Sequence
  Synthetically generated peptide
  VARIANT (1)..(17): Xaa = Any Amino Acid
CCEWXCCNPACXXTGXC

SEQ ID NO: 5902 - protein, 16 aa, Artificial Sequence
  Synthetically generated peptide
  VARIANT (1)..(16): Xaa = Any Amino Acid
CCEWXCCNPACXTXGC

SEQ ID NO: 5903 - protein, 17 aa, Artificial Sequence
  Synthetically generated peptide
  VARIANT (1)..(17): Xaa = Any Amino Acid
CCEWXCCNPACXTXXGC

SEQ ID NO: 5904 - protein, 17 aa, Artificial Sequence
  Synthetically generated peptide
  VARIANT (1)..(17): Xaa = Any Amino Acid
CCEWXCCNPACXTXGXC

SEQ ID NO: 5905 - protein, 16 aa, Artificial Sequence
  Synthetically generated peptide
  VARIANT (1)..(16): Xaa = Any Amino Acid
CCEWXCCNPACXTGXC

SEQ ID NO: 5906 - protein, 17 aa, Artificial Sequence
  Synthetically generated peptide
  VARIANT (1)..(17): Xaa = Any Amino Acid
CCEWXCCNPACXTGXXC

SEQ ID NO: 5907 - protein, 15 aa, Artificial Sequence
  Synthetically generated peptide
  VARIANT (1)..(15): Xaa = Any Amino Acid
CCEWXCCNPACTXGC

SEQ ID NO: 5908 - protein, 16 aa, Artificial Sequence
  Synthetically generated peptide
  VARIANT (1)..(16): Xaa = Any Amino Acid
CCEWXCCNPACTXXGC

SEQ ID NO: 5909 - protein, 17 aa, Artificial Sequence
  Synthetically generated peptide
  VARIANT (1)..(17): Xaa = Any Amino Acid
CCEWXCCNPACTXXXGC

SEQ ID NO: 5910 - protein, 17 aa, Artificial Sequence
  Synthetically generated peptide
  VARIANT (1)..(17): Xaa = Any Amino Acid
CCEWXCCNPACTXXGXC

SEQ ID NO: 5911 - protein, 16 aa, Artificial Sequence
  Synthetically generated peptide
  VARIANT (1)..(16): Xaa = Any Amino Acid
CCEWXCCNPACTXGXC

SEQ ID NO: 5912 - protein, 17 aa, Artificial Sequence
  Synthetically generated peptide
  VARIANT (1)..(17): Xaa = Any Amino Acid
CCEWXCCNPACTXGXXC

SEQ ID NO: 5913 - protein, 15 aa, Artificial Sequence
  Synthetically generated peptide
  VARIANT (1)..(15): Xaa = Any Amino Acid
CCEWXCCNPACTGXC

SEQ ID NO: 5914 - protein, 16 aa, Artificial Sequence
  Synthetically generated peptide
  VARIANT (1)..(16): Xaa = Any Amino Acid
CCEWXCCNPACTGXXC

SEQ ID NO: 5915 - protein, 17 aa, Artificial Sequence
  Synthetically generated peptide
  VARIANT (1)..(17): Xaa = Any Amino Acid
CCEWXCCNPACTGXXXC

SEQ ID NO: 5916 - protein, 14 aa, Artificial Sequence
  Synthetically generated peptide
  VARIANT (1)..(14): Xaa = Any Amino Acid
CCEWCCXNPACTGC

SEQ ID NO: 5917 - protein, 15 aa, Artificial Sequence
  Synthetically generated peptide
  VARIANT (1)..(15): Xaa = Any Amino Acid
CCEWCCXXNPACTGC

SEQ ID NO: 5918 - protein, 16 aa, Artificial Sequence
  Synthetically generated peptide
  VARIANT (1)..(16): Xaa = Any Amino Acid
CCEWCCXXXNPACTGC

SEQ ID NO: 5919 - protein, 17 aa, Artificial Sequence
  Synthetically generated peptide
  VARIANT (1)..(17): Xaa = Any Amino Acid
CCEWCCXXXXNPACTGC

SEQ ID NO: 5920 - protein, 17 aa, Artificial Sequence
  Synthetically generated peptide
  VARIANT (1)..(17): Xaa = Any Amino Acid
CCEWCCXXXNXPACTGC

SEQ ID NO: 5921 - protein, 17 aa, Artificial Sequence
  Synthetically generated peptide
  VARIANT (1)..(17): Xaa = Any Amino Acid
CCEWCCXXXNPXACTGC

SEQ ID NO: 5922 - protein, 17 aa, Artificial Sequence
  Synthetically generated peptide
  VARIANT (1)..(17): Xaa = Any Amino Acid
CCEWCCXXXNPAXCTGC

SEQ ID NO: 5923 - protein, 17 aa, Artificial Sequence
  Synthetically generated peptide
  VARIANT (1)..(17): Xaa = Any Amino Acid
CCEWCCXXXNPACXTGC

SEQ ID NO: 5924 - protein, 17 aa, Artificial Sequence
  Synthetically generated peptide
  VARIANT (1)..(17): Xaa = Any Amino Acid
CCEWCCXXXNPACTXGC

SEQ ID NO: 5925 - protein, 17 aa, Artificial Sequence
  Synthetically generated peptide
  VARIANT (1)..(17): Xaa = Any Amino Acid
CCEWCCXXXNPACTGXC

SEQ ID NO: 5926 - protein, 16 aa, Artificial Sequence
  Synthetically generated peptide
  VARIANT (1)..(16): Xaa = Any Amino Acid
CCEWCCXXNXPACTGC

SEQ ID NO: 5927 - protein, 17 aa, Artificial Sequence
  Synthetically generated peptide
  VARIANT (1)..(17): Xaa = Any Amino Acid
CCEWCCXXNXXPACTGC

SEQ ID NO: 5928 - protein, 17 aa, Artificial Sequence
  Synthetically generated peptide
  VARIANT (1)..(17): Xaa = Any Amino Acid
CCEWCCXXNXPXACTGC

SEQ ID NO: 5929 - protein, 17 aa, Artificial Sequence
  Synthetically generated peptide
  VARIANT (1)..(17): Xaa = Any Amino Acid
CCEWCCXXNXPAXCTGC

SEQ ID NO: 5930 - protein, 17 aa, Artificial Sequence
  Synthetically generated peptide
  VARIANT (1)..(17): Xaa = Any Amino Acid
CCEWCCXXNXPACXTGC

SEQ ID NO: 5931 - protein, 17 aa, Artificial Sequence
  Synthetically generated peptide
  VARIANT (1)..(17): Xaa = Any Amino Acid
CCEWCCXXNXPACTXGC

SEQ ID NO: 5932 - protein, 17 aa, Artificial Sequence
  Synthetically generated peptide
  VARIANT (1)..(17): Xaa = Any Amino Acid
CCEWCCXXNXPACTGXC

SEQ ID NO: 5933 - protein, 16 aa, Artificial Sequence
  Synthetically generated peptide
  VARIANT (1)..(16): Xaa = Any Amino Acid
CCEWCCXXNPXACTGC

SEQ ID NO: 5934 - protein, 17 aa, Artificial Sequence
  Synthetically generated peptide
  VARIANT (1)..(17): Xaa = Any Amino Acid
CCEWCCXXNPXXACTGC

SEQ ID NO: 5935 - protein, 17 aa, Artificial Sequence
  Synthetically generated peptide
  VARIANT (1)..(17): Xaa = Any Amino Acid
CCEWCCXXNPXAXCTGC

SEQ ID NO: 5936 - protein, 17 aa, Artificial Sequence
  Synthetically generated peptide
  VARIANT (1)..(17): Xaa = Any Amino Acid
CCEWCCXXNPXACXTGC

SEQ ID NO: 5937 - protein, 17 aa, Artificial Sequence
  Synthetically generated peptide
  VARIANT (1)..(17): Xaa = Any Amino Acid
CCEWCCXXNPXACTXGC

SEQ ID NO: 5938 - protein, 17 aa, Artificial Sequence
  Synthetically generated peptide
  VARIANT (1)..(17): Xaa = Any Amino Acid
CCEWCCXXNPXACTGXC

SEQ ID NO: 5939 - protein, 16 aa, Artificial Sequence
  Synthetically generated peptide
  VARIANT (1)..(16): Xaa = Any Amino Acid
CCEWCCXXNPAXCTGC

SEQ ID NO: 5940 - protein, 17 aa, Artificial Sequence
  Synthetically generated peptide
  VARIANT (1)..(17): Xaa = Any Amino Acid
CCEWCCXXNPAXXCTGC

SEQ ID NO: 5941 - protein, 17 aa, Artificial Sequence
  Synthetically generated peptide
  VARIANT (1)..(17): Xaa = Any Amino Acid
CCEWCCXXNPAXCXTGC

SEQ ID NO: 5942 - protein, 17 aa, Artificial Sequence
  Synthetically generated peptide
  VARIANT (1)..(17): Xaa = Any Amino Acid
CCEWCCXXNPAXCTXGC

SEQ ID NO: 5943 - protein, 17 aa, Artificial Sequence
  Synthetically generated peptide
  VARIANT (1)..(17): Xaa = Any Amino Acid
CCEWCCXXNPAXCTGXC

SEQ ID NO: 5944 - protein, 16 aa, Artificial Sequence
  Synthetically generated peptide
  VARIANT (1)..(16): Xaa = Any Amino Acid
CCEWCCXXNPACXTGC

SEQ ID NO: 5945 - protein, 17 aa, Artificial Sequence
  Synthetically generated peptide
  VARIANT (1)..(17): Xaa = Any Amino Acid
CCEWCCXXNPACXXTGC

SEQ ID NO: 5946 - protein, 17 aa, Artificial Sequence
  Synthetically generated peptide
  VARIANT (1)..(17): Xaa = Any Amino Acid
CCEWCCXXNPACXTXGC

SEQ ID NO: 5947 - protein, 17 aa, Artificial Sequence
  Synthetically generated peptide
  VARIANT (1)..(17): Xaa = Any Amino Acid
CCEWCCXXNPACXTGXC

SEQ ID NO: 5948 - protein, 16 aa, Artificial Sequence
  Synthetically generated peptide
  VARIANT (1)..(16): Xaa = Any Amino Acid
CCEWCCXXNPACTXGC

SEQ ID NO: 5949 - protein, 17 aa, Artificial Sequence
  Synthetically generated peptide
  VARIANT (1)..(17): Xaa = Any Amino Acid
CCEWCCXXNPACTXXGC

SEQ ID NO: 5950 - protein, 17 aa, Artificial Sequence
  Synthetically generated peptide
  VARIANT (1)..(17): Xaa = Any Amino Acid
CCEWCCXXNPACTXGXC

SEQ ID NO: 5951 - protein, 16 aa, Artificial Sequence
  Synthetically generated peptide
  VARIANT (1)..(16): Xaa = Any Amino Acid
CCEWCCXXNPACTGXC

SEQ ID NO: 5952 - protein, 17 aa, Artificial Sequence
  Synthetically generated peptide
  VARIANT (1)..(17): Xaa = Any Amino Acid
CCEWCCXXNPACTGXXC

SEQ ID NO: 5953 - protein, 15 aa, Artificial Sequence
  Synthetically generated peptide
  VARIANT (1)..(15): Xaa = Any Amino Acid
CCEWCCXNXPACTGC

SEQ ID NO: 5954 - protein, 16 aa, Artificial Sequence
  Synthetically generated peptide
  VARIANT (1)..(16): Xaa = Any Amino Acid
CCEWCCXNXXPACTGC

SEQ ID NO: 5955 - protein, 17 aa, Artificial Sequence
  Synthetically generated peptide
  VARIANT (1)..(17): Xaa = Any Amino Acid
CCEWCCXNXXXPACTGC

SEQ ID NO: 5956 - protein, 17 aa, Artificial Sequence
  Synthetically generated peptide
  VARIANT (1)..(17): Xaa = Any Amino Acid
CCEWCCXNXXPXACTGC

SEQ ID NO: 5957 - protein, 17 aa, Artificial Sequence
  Synthetically generated peptide
  VARIANT (1)..(17): Xaa = Any Amino Acid
CCEWCCXNXXPAXCTGC

SEQ ID NO: 5958 - protein, 17 aa, Artificial Sequence
  Synthetically generated peptide
  VARIANT (1)..(17): Xaa = Any Amino Acid
CCEWCCXNXXPACXTGC

SEQ ID NO: 5959 - protein, 17 aa, Artificial Sequence
  Synthetically generated peptide
  VARIANT (1)..(17): Xaa = Any Amino Acid
CCEWCCXNXXPACTXGC

SEQ ID NO: 5960 - protein, 17 aa, Artificial Sequence
  Synthetically generated peptide
  VARIANT (1)..(17): Xaa = Any Amino Acid
CCEWCCXNXXPACTGXC

SEQ ID NO: 5961 - protein, 16 aa, Artificial Sequence
  Synthetically generated peptide
  VARIANT (1)..(16): Xaa = Any Amino Acid
CCEWCCXNXPXACTGC

SEQ ID NO: 5962 - protein, 17 aa, Artificial Sequence
  Synthetically generated peptide
  VARIANT (1)..(17): Xaa = Any Amino Acid
CCEWCCXNXPXXACTGC

SEQ ID NO: 5963 - protein, 17 aa, Artificial Sequence
  Synthetically generated peptide
  VARIANT (1)..(17): Xaa = Any Amino Acid
CCEWCCXNXPXAXCTGC

SEQ ID NO: 5964 - protein, 17 aa, Artificial Sequence
  Synthetically generated peptide
  VARIANT (1)..(17): Xaa = Any Amino Acid
CCEWCCXNXPXACXTGC

SEQ ID NO: 5965 - protein, 17 aa, Artificial Sequence
  Synthetically generated peptide
  VARIANT (1)..(17): Xaa = Any Amino Acid
CCEWCCXNXPXACTXGC

SEQ ID NO: 5966 - protein, 17 aa, Artificial Sequence
  Synthetically generated peptide
  VARIANT (1)..(17): Xaa = Any Amino Acid
CCEWCCXNXPXACTGXC

SEQ ID NO: 5967 - protein, 16 aa, Artificial Sequence
  Synthetically generated peptide
  VARIANT (1)..(16): Xaa = Any Amino Acid
CCEWCCXNXPAXCTGC

SEQ ID NO: 5968 - protein, 17 aa, Artificial Sequence
  Synthetically generated peptide
  VARIANT (1)..(17): Xaa = Any Amino Acid
CCEWCCXNXPAXXCTGC

SEQ ID NO: 5969 - protein, 17 aa, Artificial Sequence
  Synthetically generated peptide
  VARIANT (1)..(17): Xaa = Any Amino Acid
CCEWCCXNXPAXCXTGC

SEQ ID NO: 5970 - protein, 17 aa, Artificial Sequence
  Synthetically generated peptide
  VARIANT (1)..(17): Xaa = Any Amino Acid
CCEWCCXNXPAXCTXGC

SEQ ID NO: 5971 - protein, 17 aa, Artificial Sequence
  Synthetically generated peptide
  VARIANT (1)..(17): Xaa = Any Amino Acid
CCEWCCXNXPAXCTGXC

SEQ ID NO: 5972 - protein, 16 aa, Artificial Sequence
  Synthetically generated peptide
  VARIANT (1)..(16): Xaa = Any Amino Acid
CCEWCCXNXPACXTGC

SEQ ID NO: 5973 - protein, 17 aa, Artificial Sequence
  Synthetically generated peptide
  VARIANT (1)..(17): Xaa = Any Amino Acid
CCEWCCXNXPACXXTGC

SEQ ID NO: 5974 - protein, 17 aa, Artificial Sequence
  Synthetically generated peptide
  VARIANT (1)..(17): Xaa = Any Amino Acid
CCEWCCXNXPACXTXGC

SEQ ID NO: 5975 - protein, 17 aa, Artificial Sequence
  Synthetically generated peptide
  VARIANT (1)..(17): Xaa = Any Amino Acid
CCEWCCXNXPACXTGXC

SEQ ID NO: 5976 - protein, 16 aa, Artificial Sequence
  Synthetically generated peptide
  VARIANT (1)..(16): Xaa = Any Amino Acid
CCEWCCXNXPACTXGC

SEQ ID NO: 5977 - protein, 17 aa, Artificial Sequence
  Synthetically generated peptide
  VARIANT (1)..(17): Xaa = Any Amino Acid
CCEWCCXNXPACTXXGC

SEQ ID NO: 5978 - protein, 17 aa, Artificial Sequence
  Synthetically generated peptide
  VARIANT (1)..(17): Xaa = Any Amino Acid
CCEWCCXNXPACTXGXC

SEQ ID NO: 5979 - protein, 16 aa, Artificial Sequence
  Synthetically generated peptide
  VARIANT (1)..(16): Xaa = Any Amino Acid
CCEWCCXNXPACTGXC

SEQ ID NO: 5980 - protein, 17 aa, Artificial Sequence
  Synthetically generated peptide
  VARIANT (1)..(17): Xaa = Any Amino Acid
CCEWCCXNXPACTGXXC

SEQ ID NO: 5981 - protein, 15 aa, Artificial Sequence
  Synthetically generated peptide
  VARIANT (1)..(15): Xaa = Any Amino Acid
CCEWCCXNPXACTGC

SEQ ID NO: 5982 - protein, 16 aa, Artificial Sequence
  Synthetically generated peptide
  VARIANT (1)..(16): Xaa = Any Amino Acid
CCEWCCXNPXXACTGC

SEQ ID NO: 5983 - protein, 17 aa, Artificial Sequence
  Synthetically generated peptide
  VARIANT (1)..(17): Xaa = Any Amino Acid
CCEWCCXNPXXXACTGC

SEQ ID NO: 5984 - protein, 17 aa, Artificial Sequence
  Synthetically generated peptide
  VARIANT (1)..(17): Xaa = Any Amino Acid
CCEWCCXNPXXAXCTGC

SEQ ID NO: 5985 - protein, 17 aa, Artificial Sequence
  Synthetically generated peptide
  VARIANT (1)..(17): Xaa = Any Amino Acid
CCEWCCXNPXXACXTGC

SEQ ID NO: 5986 - protein, 17 aa, Artificial Sequence
  Synthetically generated peptide
  VARIANT (1)..(17): Xaa = Any Amino Acid
CCEWCCXNPXXACTXGC

SEQ ID NO: 5987 - protein, 17 aa, Artificial Sequence
  Synthetically generated peptide
  VARIANT (1)..(17): Xaa = Any Amino Acid
CCEWCCXNPXXACTGXC

SEQ ID NO: 5988 - protein, 16 aa, Artificial Sequence
  Synthetically generated peptide
  VARIANT (1)..(16): Xaa = Any Amino Acid
CCEWCCXNPXAXCTGC

SEQ ID NO: 5989 - protein, 17 aa, Artificial Sequence
  Synthetically generated peptide
  VARIANT (1)..(17): Xaa = Any Amino Acid
CCEWCCXNPXAXXCTGC

SEQ ID NO: 5990 - protein, 17 aa, Artificial Sequence
  Synthetically generated peptide
  VARIANT (1)..(17): Xaa = Any Amino Acid
CCEWCCXNPXAXCXTGC

SEQ ID NO: 5991 - protein, 17 aa, Artificial Sequence
  Synthetically generated peptide
  VARIANT (1)..(17): Xaa = Any Amino Acid
CCEWCCXNPXAXCTXGC

SEQ ID NO: 5992 - protein, 17 aa, Artificial Sequence
  Synthetically generated peptide
  VARIANT (1)..(17): Xaa = Any Amino Acid
CCEWCCXNPXAXCTGXC

SEQ ID NO: 5993 - protein, 16 aa, Artificial Sequence
  Synthetically generated peptide
  VARIANT (1)..(16): Xaa = Any Amino Acid
CCEWCCXNPXACXTGC

SEQ ID NO: 5994 - protein, 17 aa, Artificial Sequence
  Synthetically generated peptide
  VARIANT (1)..(17): Xaa = Any Amino Acid
CCEWCCXNPXACXXTGC

SEQ ID NO: 5995 - protein, 17 aa, Artificial Sequence
  Synthetically generated peptide
  VARIANT (1)..(17): Xaa = Any Amino Acid
CCEWCCXNPXACXTXGC

SEQ ID NO: 5996 - protein, 17 aa, Artificial Sequence
  Synthetically generated peptide
  VARIANT (1)..(17): Xaa = Any Amino Acid
CCEWCCXNPXACXTGXC

SEQ ID NO: 5997 - protein, 16 aa, Artificial Sequence
  Synthetically generated peptide
  VARIANT (1)..(16): Xaa = Any Amino Acid
CCEWCCXNPXACTXGC

SEQ ID NO: 5998 - protein, 17 aa, Artificial Sequence
  Synthetically generated peptide
  VARIANT (1)..(17): Xaa = Any Amino Acid
CCEWCCXNPXACTXXGC

SEQ ID NO: 5999 - protein, 17 aa, Artificial Sequence
  Synthetically generated peptide
  VARIANT (1)..(17): Xaa = Any Amino Acid
CCEWCCXNPXACTXGXC

SEQ ID NO: 6000 - protein, 16 aa, Artificial Sequence
  Synthetically generated peptide
  VARIANT (1)..(16): Xaa = Any Amino Acid
CCEWCCXNPXACTGXC

SEQ ID NO: 6001 - protein, 17 aa, Artificial Sequence
  Synthetically generated peptide
  VARIANT (1)..(17): Xaa = Any Amino Acid
CCEWCCXNPXACTGXXC

SEQ ID NO: 6002 - protein, 15 aa, Artificial Sequence
  Synthetically generated peptide
  VARIANT (1)..(15): Xaa = Any Amino Acid
CCEWCCXNPAXCTGC

SEQ ID NO: 6003 - protein, 16 aa, Artificial Sequence
  Synthetically generated peptide
  VARIANT (1)..(16): Xaa = Any Amino Acid
CCEWCCXNPAXXCTGC

SEQ ID NO: 6004 - protein, 17 aa, Artificial Sequence
  Synthetically generated peptide
  VARIANT (1)..(17): Xaa = Any Amino Acid
CCEWCCXNPAXXXCTGC

SEQ ID NO: 6005 - protein, 17 aa, Artificial Sequence
  Synthetically generated peptide
  VARIANT (1)..(17): Xaa = Any Amino Acid
CCEWCCXNPAXXCXTGC

SEQ ID NO: 6006 - protein, 17 aa, Artificial Sequence
  Synthetically generated peptide
  VARIANT (1)..(17): Xaa = Any Amino Acid
CCEWCCXNPAXXCTXGC

SEQ ID NO: 6007 - protein, 17 aa, Artificial Sequence
  Synthetically generated peptide
  VARIANT (1)..(17): Xaa = Any Amino Acid
CCEWCCXNPAXXCTGXC

SEQ ID NO: 6008 - protein, 16 aa, Artificial Sequence
  Synthetically generated peptide
  VARIANT (1)..(16): Xaa = Any Amino Acid
CCEWCCXNPAXCXTGC

SEQ ID NO: 6009 - protein, 17 aa, Artificial Sequence
  Synthetically generated peptide
  VARIANT (1)..(17): Xaa = Any Amino Acid
CCEWCCXNPAXCXXTGC

SEQ ID NO: 6010 - protein, 17 aa, Artificial Sequence
  Synthetically generated peptide
  VARIANT (1)..(17): Xaa = Any Amino Acid
CCEWCCXNPAXCXTXGC

SEQ ID NO: 6011 - protein, 17 aa, Artificial Sequence
  Synthetically generated peptide
  VARIANT (1)..(17): Xaa = Any Amino Acid
CCEWCCXNPAXCXTGXC

SEQ ID NO: 6012 - protein, 16 aa, Artificial Sequence
  Synthetically generated peptide
  VARIANT (1)..(16): Xaa = Any Amino Acid
CCEWCCXNPAXCTXGC

SEQ ID NO: 6013 - protein, 17 aa, Artificial Sequence
  Synthetically generated peptide
  VARIANT (1)..(17): Xaa = Any Amino Acid
CCEWCCXNPAXCTXXGC

SEQ ID NO: 6014 - protein, 17 aa, Artificial Sequence
  Synthetically generated peptide
  VARIANT (1)..(17): Xaa = Any Amino Acid
CCEWCCXNPAXCTXGXC

SEQ ID NO: 6015 - protein, 16 aa, Artificial Sequence
  Synthetically generated peptide
  VARIANT (1)..(16): Xaa = Any Amino Acid
CCEWCCXNPAXCTGXC

SEQ ID NO: 6016 - protein, 17 aa, Artificial Sequence
  Synthetically generated peptide
  VARIANT (1)..(17): Xaa = Any Amino Acid
CCEWCCXNPAXCTGXXC

SEQ ID NO: 6017 - protein, 15 aa, Artificial Sequence
  Synthetically generated peptide
  VARIANT (1)..(15): Xaa = Any Amino Acid
CCEWCCXNPACXTGC

SEQ ID NO: 6018 - protein, 16 aa, Artificial Sequence
  Synthetically generated peptide
  VARIANT (1)..(16): Xaa = Any Amino Acid
CCEWCCXNPACXXTGC

SEQ ID NO: 6019 - protein, 17 aa, Artificial Sequence
  Synthetically generated peptide
  VARIANT (1)..(17): Xaa = Any Amino Acid
CCEWCCXNPACXXXTGC

SEQ ID NO: 6020 - protein, 17 aa, Artificial Sequence
  Synthetically generated peptide
  VARIANT (1)..(17): Xaa = Any Amino Acid
CCEWCCXNPACXXTXGC

SEQ ID NO: 6021 - protein, 17 aa, Artificial Sequence
  Synthetically generated peptide
  VARIANT (1)..(17): Xaa = Any Amino Acid
CCEWCCXNPACXXTGXC

SEQ ID NO: 6022 - protein, 16 aa, Artificial Sequence
  Synthetically generated peptide
  VARIANT (1)..(16): Xaa = Any Amino Acid
CCEWCCXNPACXTXGC

SEQ ID NO: 6023 - protein, 17 aa, Artificial Sequence
  Synthetically generated peptide
  VARIANT (1)..(17): Xaa = Any Amino Acid
CCEWCCXNPACXTXXGC

SEQ ID NO: 6024 - protein, 17 aa, Artificial Sequence
  Synthetically generated peptide
  VARIANT (1)..(17): Xaa = Any Amino Acid
CCEWCCXNPACXTXGXC

SEQ ID NO: 6025 - protein, 16 aa, Artificial Sequence
  Synthetically generated peptide
  VARIANT (1)..(16): Xaa = Any Amino Acid
CCEWCCXNPACXTGXC

SEQ ID NO: 6026 - protein, 17 aa, Artificial Sequence
  Synthetically generated peptide
  VARIANT (1)..(17): Xaa = Any Amino Acid
CCEWCCXNPACXTGXXC

SEQ ID NO: 6027 - protein, 15 aa, Artificial Sequence
  Synthetically generated peptide
  VARIANT (1)..(15): Xaa = Any Amino Acid
CCEWCCXNPACTXGC

SEQ ID NO: 6028 - protein, 16 aa, Artificial Sequence
  Synthetically generated peptide
  VARIANT (1)..(16): Xaa = Any Amino Acid
CCEWCCXNPACTXXGC

SEQ ID NO: 6029 - protein, 17 aa, Artificial Sequence
  Synthetically generated peptide
  VARIANT (1)..(17): Xaa = Any Amino Acid
CCEWCCXNPACTXXXGC

SEQ ID NO: 6030 - protein, 17 aa, Artificial Sequence
  Synthetically generated peptide
  VARIANT (1)..(17): Xaa = Any Amino Acid
CCEWCCXNPACTXXGXC

SEQ ID NO: 6031 - protein, 16 aa, Artificial Sequence
  Synthetically generated peptide
  VARIANT (1)..(16): Xaa = Any Amino Acid
CCEWCCXNPACTXGXC

SEQ ID NO: 6032 - protein, 17 aa, Artificial Sequence
  Synthetically generated peptide
  VARIANT (1)..(17): Xaa = Any Amino Acid
CCEWCCXNPACTXGXXC

SEQ ID NO: 6033 - protein, 15 aa, Artificial Sequence
  Synthetically generated peptide
  VARIANT (1)..(15): Xaa = Any Amino Acid
CCEWCCXNPACTGXC

SEQ ID NO: 6034 - protein, 16 aa, Artificial Sequence
  Synthetically generated peptide
  VARIANT (1)..(16): Xaa = Any Amino Acid
CCEWCCXNPACTGXXC

SEQ ID NO: 6035 - protein, 17 aa, Artificial Sequence
  Synthetically generated peptide
  VARIANT (1)..(17): Xaa = Any Amino Acid
CCEWCCXNPACTGXXXC

SEQ ID NO: 6036 - protein, 14 aa, Artificial Sequence
  Synthetically generated peptide
  VARIANT (1)..(14): Xaa = Any Amino Acid
CCEWCCNXPACTGC

SEQ ID NO: 6037 - protein, 15 aa, Artificial Sequence
  Synthetically generated peptide
  VARIANT (1)..(15): Xaa = Any Amino Acid
CCEWCCNXXPACTGC

SEQ ID NO: 6038 - protein, 16 aa, Artificial Sequence
  Synthetically generated peptide
  VARIANT (1)..(16): Xaa = Any Amino Acid
CCEWCCNXXXPACTGC

SEQ ID NO: 6039 - protein, 17 aa, Artificial Sequence
  Synthetically generated peptide
  VARIANT (1)..(17): Xaa = Any Amino Acid
CCEWCCNXXXXPACTGC

SEQ ID NO: 6040 - protein, 17 aa, Artificial Sequence
  Synthetically generated peptide
  VARIANT (1)..(17): Xaa = Any Amino Acid
CCEWCCNXXXPXACTGC

SEQ ID NO: 6041 - protein, 17 aa, Artificial Sequence
  Synthetically generated peptide
  VARIANT (1)..(17): Xaa = Any Amino Acid
CCEWCCNXXXPAXCTGC

SEQ ID NO: 6042 - protein, 17 aa, Artificial Sequence
  Synthetically generated peptide
  VARIANT (1)..(17): Xaa = Any Amino Acid
CCEWCCNXXXPACXTGC

SEQ ID NO: 6043 - protein, 17 aa, Artificial Sequence
  Synthetically generated peptide
  VARIANT (1)..(17): Xaa = Any Amino Acid
CCEWCCNXXXPACTXGC

SEQ ID NO: 6044 - protein, 17 aa, Artificial Sequence
  Synthetically generated peptide
  VARIANT (1)..(17): Xaa = Any Amino Acid
CCEWCCNXXXPACTGXC

SEQ ID NO: 6045 - protein, 16 aa, Artificial Sequence
  Synthetically generated peptide
  VARIANT (1)..(16): Xaa = Any Amino Acid
CCEWCCNXXPXACTGC

SEQ ID NO: 6046 - protein, 17 aa, Artificial Sequence
  Synthetically generated peptide
  VARIANT (1)..(17): Xaa = Any Amino Acid
CCEWCCNXXPXXACTGC

SEQ ID NO: 6047 - protein, 17 aa, Artificial Sequence
  Synthetically generated peptide
  VARIANT (1)..(17): Xaa = Any Amino Acid
CCEWCCNXXPXAXCTGC

SEQ ID NO: 6048 - protein, 17 aa, Artificial Sequence
  Synthetically generated peptide
  VARIANT (1)..(17): Xaa = Any Amino Acid
CCEWCCNXXPXACXTGC

SEQ ID NO: 6049 - protein, 17 aa, Artificial Sequence
  Synthetically generated peptide
  VARIANT (1)..(17): Xaa = Any Amino Acid
CCEWCCNXXPXACTXGC

SEQ ID NO: 6050 - protein, 17 aa, Artificial Sequence
  Synthetically generated peptide
  VARIANT (1)..(17): Xaa = Any Amino Acid
CCEWCCNXXPXACTGXC

SEQ ID NO: 6051 - protein, 16 aa, Artificial Sequence
  Synthetically generated peptide
  VARIANT (1)..(16): Xaa = Any Amino Acid
CCEWCCNXXPAXCTGC

SEQ ID NO: 6052 - protein, 17 aa, Artificial Sequence
  Synthetically generated peptide
  VARIANT (1)..(17): Xaa = Any Amino Acid
CCEWCCNXXPAXXCTGC

SEQ ID NO: 6053 - protein, 17 aa, Artificial Sequence
  Synthetically generated peptide
  VARIANT (1)..(17): Xaa = Any Amino Acid
CCEWCCNXXPAXCXTGC

SEQ ID NO: 6054 - protein, 17 aa, Artificial Sequence
  Synthetically generated peptide
  VARIANT (1)..(17): Xaa = Any Amino Acid
CCEWCCNXXPAXCTXGC

SEQ ID NO: 6055 - protein, 17 aa, Artificial Sequence
  Synthetically generated peptide
  VARIANT (1)..(17): Xaa = Any Amino Acid
CCEWCCNXXPAXCTGXC

SEQ ID NO: 6056 - protein, 16 aa, Artificial Sequence
  Synthetically generated peptide
  VARIANT (1)..(16): Xaa = Any Amino Acid
CCEWCCNXXPACXTGC

SEQ ID NO: 6057 - protein, 17 aa, Artificial Sequence
  Synthetically generated peptide
  VARIANT (1)..(17): Xaa = Any Amino Acid
CCEWCCNXXPACXXTGC

SEQ ID NO: 6058 - protein, 17 aa, Artificial Sequence
  Synthetically generated peptide
  VARIANT (1)..(17): Xaa = Any Amino Acid
CCEWCCNXXPACXTXGC

SEQ ID NO: 6059 - protein, 17 aa, Artificial Sequence
  Synthetically generated peptide
  VARIANT (1)..(17): Xaa = Any Amino Acid
CCEWCCNXXPACXTGXC

SEQ ID NO: 6060 - protein, 16 aa, Artificial Sequence
  Synthetically generated peptide
  VARIANT (1)..(16): Xaa = Any Amino Acid
CCEWCCNXXPACTXGC

SEQ ID NO: 6061 - protein, 17 aa, Artificial Sequence
  Synthetically generated peptide
  VARIANT (1)..(17): Xaa = Any Amino Acid
CCEWCCNXXPACTXXGC

SEQ ID NO: 6062 - protein, 17 aa, Artificial Sequence
  Synthetically generated peptide
  VARIANT (1)..(17): Xaa = Any Amino Acid
CCEWCCNXXPACTXGXC

SEQ ID NO: 6063 - protein, 16 aa, Artificial Sequence
  Synthetically generated peptide
  VARIANT (1)..(16): Xaa = Any Amino Acid
CCEWCCNXXPACTGXC

SEQ ID NO: 6064 - protein, 17 aa, Artificial Sequence
  Synthetically generated peptide
  VARIANT (1)..(17): Xaa = Any Amino Acid
CCEWCCNXXPACTGXXC

SEQ ID NO: 6065 - protein, 15 aa, Artificial Sequence
  Synthetically generated peptide
  VARIANT (1)..(15): Xaa = Any Amino Acid
CCEWCCNXPXACTGC

SEQ ID NO: 6066 - protein, 16 aa, Artificial Sequence
  Synthetically generated peptide
  VARIANT (1)..(16): Xaa = Any Amino Acid
CCEWCCNXPXXACTGC

SEQ ID NO: 6067 - protein, 17 aa, Artificial Sequence
  Synthetically generated peptide
  VARIANT (1)..(17): Xaa = Any Amino Acid
CCEWCCNXPXXXACTGC

SEQ ID NO: 6068 - protein, 17 aa, Artificial Sequence
  Synthetically generated peptide
  VARIANT (1)..(17): Xaa = Any Amino Acid
CCEWCCNXPXXAXCTGC

SEQ ID NO: 6069 - protein, 17 aa, Artificial Sequence
  Synthetically generated peptide
  VARIANT (1)..(17): Xaa = Any Amino Acid
CCEWCCNXPXXACXTGC

SEQ ID NO: 6070 - protein, 17 aa, Artificial Sequence
  Synthetically generated peptide
  VARIANT (1)..(17): Xaa = Any Amino Acid
CCEWCCNXPXXACTXGC

SEQ ID NO: 6071 - protein, 17 aa, Artificial Sequence
  Synthetically generated peptide
  VARIANT (1)..(17): Xaa = Any Amino Acid
CCEWCCNXPXXACTGXC

SEQ ID NO: 6072 - protein, 16 aa, Artificial Sequence
  Synthetically generated peptide
  VARIANT (1)..(16): Xaa = Any Amino Acid
CCEWCCNXPXAXCTGC

SEQ ID NO: 6073 - protein, 17 aa, Artificial Sequence
  Synthetically generated peptide
  VARIANT (1)..(17): Xaa = Any Amino Acid
CCEWCCNXPXAXXCTGC

SEQ ID NO: 6074 - protein, 17 aa, Artificial Sequence
  Synthetically generated peptide
  VARIANT (1)..(17): Xaa = Any Amino Acid
CCEWCCNXPXAXCXTGC

SEQ ID NO: 6075 - protein, 17 aa, Artificial Sequence
  Synthetically generated peptide
  VARIANT (1)..(17): Xaa = Any Amino Acid
CCEWCCNXPXAXCTXGC

SEQ ID NO: 6076 - protein, 17 aa, Artificial Sequence
  Synthetically generated peptide
  VARIANT (1)..(17): Xaa = Any Amino Acid
CCEWCCNXPXAXCTGXC

SEQ ID NO: 6077 - protein, 16 aa, Artificial Sequence
  Synthetically generated peptide
  VARIANT (1)..(16): Xaa = Any Amino Acid
CCEWCCNXPXACXTGC

SEQ ID NO: 6078 - protein, 17 aa, Artificial Sequence
  Synthetically generated peptide
  VARIANT (1)..(17): Xaa = Any Amino Acid
CCEWCCNXPXACXXTGC

SEQ ID NO: 6079 - protein, 17 aa, Artificial Sequence
  Synthetically generated peptide
  VARIANT (1)..(17): Xaa = Any Amino Acid
CCEWCCNXPXACXTXGC

SEQ ID NO: 6080 - protein, 17 aa, Artificial Sequence
  Synthetically generated peptide
  VARIANT (1)..(17): Xaa = Any Amino Acid
CCEWCCNXPXACXTGXC

SEQ ID NO: 6081 - protein, 16 aa, Artificial Sequence
  Synthetically generated peptide
  VARIANT (1)..(16): Xaa = Any Amino Acid
CCEWCCNXPXACTXGC

SEQ ID NO: 6082 - protein, 17 aa, Artificial Sequence
  Synthetically generated peptide
  VARIANT (1)..(17): Xaa = Any Amino Acid
CCEWCCNXPXACTXXGC

SEQ ID NO: 6083 - protein, 17 aa, Artificial Sequence
  Synthetically generated peptide
  VARIANT (1)..(17): Xaa = Any Amino Acid
CCEWCCNXPXACTXGXC

SEQ ID NO: 6084 - protein, 16 aa, Artificial Sequence
  Synthetically generated peptide
  VARIANT (1)..(16): Xaa = Any Amino Acid
CCEWCCNXPXACTGXC

SEQ ID NO: 6085 - protein, 17 aa, Artificial Sequence
  Synthetically generated peptide
  VARIANT (1)..(17): Xaa = Any Amino Acid
CCEWCCNXPXACTGXXC

SEQ ID NO: 6086 - protein, 15 aa, Artificial Sequence
  Synthetically generated peptide
  VARIANT (1)..(15): Xaa = Any Amino Acid
CCEWCCNXPAXCTGC

SEQ ID NO: 6087 - protein, 16 aa, Artificial Sequence
  Synthetically generated peptide
  VARIANT (1)..(16): Xaa = Any Amino Acid
CCEWCCNXPAXXCTGC

SEQ ID NO: 6088 - protein, 17 aa, Artificial Sequence
  Synthetically generated peptide
  VARIANT (1)..(17): Xaa = Any Amino Acid
CCEWCCNXPAXXXCTGC

SEQ ID NO: 6089 - protein, 17 aa, Artificial Sequence
  Synthetically generated peptide
  VARIANT (1)..(17): Xaa = Any Amino Acid
CCEWCCNXPAXXCXTGC

SEQ ID NO: 6090 - protein, 17 aa, Artificial Sequence
  Synthetically generated peptide
  VARIANT (1)..(17): Xaa = Any Amino Acid
CCEWCCNXPAXXCTXGC

SEQ ID NO: 6091 - protein, 17 aa, Artificial Sequence
  Synthetically generated peptide
  VARIANT (1)..(17): Xaa = Any Amino Acid
CCEWCCNXPAXXCTGXC

SEQ ID NO: 6092 - protein, 16 aa, Artificial Sequence
  Synthetically generated peptide
  VARIANT (1)..(16): Xaa = Any Amino Acid
CCEWCCNXPAXCXTGC

SEQ ID NO: 6093 - protein, 17 aa, Artificial Sequence
  Synthetically generated peptide
  VARIANT (1)..(17): Xaa = Any Amino Acid
CCEWCCNXPAXCXXTGC

SEQ ID NO: 6094 - protein, 17 aa, Artificial Sequence
  Synthetically generated peptide
  VARIANT (1)..(17): Xaa = Any Amino Acid
CCEWCCNXPAXCXTXGC

SEQ ID NO: 6095 - protein, 17 aa, Artificial Sequence
  Synthetically generated peptide
  VARIANT (1)..(17): Xaa = Any Amino Acid
CCEWCCNXPAXCXTGXC

SEQ ID NO: 6096 - protein, 16 aa, Artificial Sequence
  Synthetically generated peptide
  VARIANT (1)..(16): Xaa = Any Amino Acid
CCEWCCNXPAXCTXGC

SEQ ID NO: 6097 - protein, 17 aa, Artificial Sequence
  Synthetically generated peptide
  VARIANT (1)..(17): Xaa = Any Amino Acid
CCEWCCNXPAXCTXXGC

SEQ ID NO: 6098 - protein, 17 aa, Artificial Sequence
  Synthetically generated peptide
  VARIANT (1)..(17): Xaa = Any Amino Acid
CCEWCCNXPAXCTXGXC

SEQ ID NO: 6099 - protein, 16 aa, Artificial Sequence
  Synthetically generated peptide
  VARIANT (1)..(16): Xaa = Any Amino Acid
CCEWCCNXPAXCTGXC

SEQ ID NO: 6100 - protein, 17 aa, Artificial Sequence
  Synthetically generated peptide
  VARIANT (1)..(17): Xaa = Any Amino Acid
CCEWCCNXPAXCTGXXC

SEQ ID NO: 6101 - protein, 15 aa, Artificial Sequence
  Synthetically generated peptide
  VARIANT (1)..(15): Xaa = Any Amino Acid
CCEWCCNXPACXTGC

SEQ ID NO: 6102 - protein, 16 aa, Artificial Sequence
  Synthetically generated peptide
  VARIANT (1)..(16): Xaa = Any Amino Acid
CCEWCCNXPACXXTGC

SEQ ID NO: 6103 - protein, 17 aa, Artificial Sequence
  Synthetically generated peptide
  VARIANT (1)..(17): Xaa = Any Amino Acid
CCEWCCNXPACXXXTGC

SEQ ID NO: 6104 - protein, 17 aa, Artificial Sequence
  Synthetically generated peptide
  VARIANT (1)..(17): Xaa = Any Amino Acid
CCEWCCNXPACXXTXGC

SEQ ID NO: 6105 - protein, 17 aa, Artificial Sequence
  Synthetically generated peptide
  VARIANT (1)..(17): Xaa = Any Amino Acid
CCEWCCNXPACXXTGXC

SEQ ID NO: 6106 - protein, 16 aa, Artificial Sequence
  Synthetically generated peptide
  VARIANT (1)..(16): Xaa = Any Amino Acid
CCEWCCNXPACXTXGC

SEQ ID NO: 6107 - protein, 17 aa, Artificial Sequence
  Synthetically generated peptide
  VARIANT (1)..(17): Xaa = Any Amino Acid
CCEWCCNXPACXTXXGC

SEQ ID NO: 6108 - protein, 17 aa, Artificial Sequence
  Synthetically generated peptide
  VARIANT (1)..(17): Xaa = Any Amino Acid
CCEWCCNXPACXTXGXC

SEQ ID NO: 6109 - protein, 16 aa, Artificial Sequence
  Synthetically generated peptide
  VARIANT (1)..(16): Xaa = Any Amino Acid
CCEWCCNXPACXTGXC

SEQ ID NO: 6110 - protein, 17 aa, Artificial Sequence
  Synthetically generated peptide
  VARIANT (1)..(17): Xaa = Any Amino Acid
CCEWCCNXPACXTGXXC

SEQ ID NO: 6111 - protein, 15 aa, Artificial Sequence
  Synthetically generated peptide
  VARIANT (1)..(15): Xaa = Any Amino Acid
CCEWCCNXPACTXGC

SEQ ID NO: 6112 - protein, 16 aa, Artificial Sequence
  Synthetically generated peptide
  VARIANT (1)..(16): Xaa = Any Amino Acid
CCEWCCNXPACTXXGC

SEQ ID NO: 6113 - protein, 17 aa, Artificial Sequence
  Synthetically generated peptide
  VARIANT (1)..(17): Xaa = Any Amino Acid
CCEWCCNXPACTXXXGC

SEQ ID NO: 6114 - protein, 17 aa, Artificial Sequence
  Synthetically generated peptide
  VARIANT (1)..(17): Xaa = Any Amino Acid
CCEWCCNXPACTXXGXC

SEQ ID NO: 6115 - protein, 16 aa, Artificial Sequence
  Synthetically generated peptide
  VARIANT (1)..(16): Xaa = Any Amino Acid
CCEWCCNXPACTXGXC

SEQ ID NO: 6116 - protein, 17 aa, Artificial Sequence
  Synthetically generated peptide
  VARIANT (1)..(17): Xaa = Any Amino Acid
CCEWCCNXPACTXGXXC

SEQ ID NO: 6117 - protein, 15 aa, Artificial Sequence
  Synthetically generated peptide
  VARIANT (1)..(15): Xaa = Any Amino Acid
CCEWCCNXPACTGXC

SEQ ID NO: 6118 - protein, 16 aa, Artificial Sequence
  Synthetically generated peptide
  VARIANT (1)..(16): Xaa = Any Amino Acid
CCEWCCNXPACTGXXC

SEQ ID NO: 6119 - protein, 17 aa, Artificial Sequence
  Synthetically generated peptide
  VARIANT (1)..(17): Xaa = Any Amino Acid
CCEWCCNXPACTGXXXC

SEQ ID NO: 6120 - protein, 14 aa, Artificial Sequence
  Synthetically generated peptide
  VARIANT (1)..(14): Xaa = Any Amino Acid
CCEWCCNPXACTGC

SEQ ID NO: 6121 - protein, 15 aa, Artificial Sequence
  Synthetically generated peptide
  VARIANT (1)..(15): Xaa = Any Amino Acid
CCEWCCNPXXACTGC

SEQ ID NO: 6122 - protein, 16 aa, Artificial Sequence
  Synthetically generated peptide
  VARIANT (1)..(16): Xaa = Any Amino Acid
CCEWCCNPXXXACTGC

SEQ ID NO: 6123 - protein, 17 aa, Artificial Sequence
  Synthetically generated peptide
  VARIANT (1)..(17): Xaa = Any Amino Acid
CCEWCCNPXXXXACTGC

SEQ ID NO: 6124 - protein, 17 aa, Artificial Sequence
  Synthetically generated peptide
  VARIANT (1)..(17): Xaa = Any Amino Acid
CCEWCCNPXXXAXCTGC

SEQ ID NO: 6125 - protein, 17 aa, Artificial Sequence
  Synthetically generated peptide
  VARIANT (1)..(17): Xaa = Any Amino Acid
CCEWCCNPXXXACXTGC

SEQ ID NO: 6126 - protein, 17 aa, Artificial Sequence
  Synthetically generated peptide
  VARIANT (1)..(17): Xaa = Any Amino Acid
CCEWCCNPXXXACTXGC

SEQ ID NO: 6127 - protein, 17 aa, Artificial Sequence
  Synthetically generated peptide
  VARIANT (1)..(17): Xaa = Any Amino Acid
CCEWCCNPXXXACTGXC

SEQ ID NO: 6128 - protein, 16 aa, Artificial Sequence
  Synthetically generated peptide
  VARIANT (1)..(16): Xaa = Any Amino Acid
CCEWCCNPXXAXCTGC

SEQ ID NO: 6129 - protein, 17 aa, Artificial Sequence
  Synthetically generated peptide
  VARIANT (1)..(17): Xaa = Any Amino Acid
CCEWCCNPXXAXXCTGC

SEQ ID NO: 6130 - protein, 17 aa, Artificial Sequence
  Synthetically generated peptide
  VARIANT (1)..(17): Xaa = Any Amino Acid
CCEWCCNPXXAXCXTGC

SEQ ID NO: 6131 - protein, 17 aa, Artificial Sequence
  Synthetically generated peptide
  VARIANT (1)..(17): Xaa = Any Amino Acid
CCEWCCNPXXAXCTXGC

SEQ ID NO: 6132 - protein, 17 aa, Artificial Sequence
  Synthetically generated peptide
  VARIANT (1)..(17): Xaa = Any Amino Acid
CCEWCCNPXXAXCTGXC

SEQ ID NO: 6133 - protein, 16 aa, Artificial Sequence
  Synthetically generated peptide
  VARIANT (1)..(16): Xaa = Any Amino Acid
CCEWCCNPXXACXTGC

SEQ ID NO: 6134 - protein, 17 aa, Artificial Sequence
  Synthetically generated peptide
  VARIANT (1)..(17): Xaa = Any Amino Acid
CCEWCCNPXXACXXTGC

SEQ ID NO: 6135 - protein, 17 aa, Artificial Sequence
  Synthetically generated peptide
  VARIANT (1)..(17): Xaa = Any Amino Acid
CCEWCCNPXXACXTXGC

SEQ ID NO: 6136 - protein, 17 aa, Artificial Sequence
  Synthetically generated peptide
  VARIANT (1)..(17): Xaa = Any Amino Acid
CCEWCCNPXXACXTGXC

SEQ ID NO: 6137 - protein, 16 aa, Artificial Sequence
  Synthetically generated peptide
  VARIANT (1)..(16): Xaa = Any Amino Acid
CCEWCCNPXXACTXGC

SEQ ID NO: 6138 - protein, 17 aa, Artificial Sequence
  Synthetically generated peptide
  VARIANT (1)..(17): Xaa = Any Amino Acid
CCEWCCNPXXACTXXGC

SEQ ID NO: 6139 - protein, 17 aa, Artificial Sequence
  Synthetically generated peptide
  VARIANT (1)..(17): Xaa = Any Amino Acid
CCEWCCNPXXACTXGXC

SEQ ID NO: 6140 - protein, 16 aa, Artificial Sequence
  Synthetically generated peptide
  VARIANT (1)..(16): Xaa = Any Amino Acid
CCEWCCNPXXACTGXC

SEQ ID NO: 6141 - protein, 17 aa, Artificial Sequence
  Synthetically generated peptide
  VARIANT (1)..(17): Xaa = Any Amino Acid
CCEWCCNPXXACTGXXC

SEQ ID NO: 6142 - protein, 15 aa, Artificial Sequence
  Synthetically generated peptide
  VARIANT (1)..(15): Xaa = Any Amino Acid
CCEWCCNPXAXCTGC

SEQ ID NO: 6143 - protein, 16 aa, Artificial Sequence
  Synthetically generated peptide
  VARIANT (1)..(16): Xaa = Any Amino Acid
CCEWCCNPXAXXCTGC

SEQ ID NO: 6144 - protein, 17 aa, Artificial Sequence
  Synthetically generated peptide
  VARIANT (1)..(17): Xaa = Any Amino Acid
CCEWCCNPXAXXXCTGC

SEQ ID NO: 6145 - protein, 17 aa, Artificial Sequence
  Synthetically generated peptide
  VARIANT (1)..(17): Xaa = Any Amino Acid
CCEWCCNPXAXXCXTGC

SEQ ID NO: 6146 - protein, 17 aa, Artificial Sequence
  Synthetically generated peptide
  VARIANT (1)..(17): Xaa = Any Amino Acid
CCEWCCNPXAXXCTXGC

SEQ ID NO: 6147 - protein, 17 aa, Artificial Sequence
  Synthetically generated peptide
  VARIANT (1)..(17): Xaa = Any Amino Acid
CCEWCCNPXAXXCTGXC

SEQ ID NO: 6148 - protein, 16 aa, Artificial Sequence
  Synthetically generated peptide
  VARIANT (1)..(16): Xaa = Any Amino Acid
CCEWCCNPXAXCXTGC

SEQ ID NO: 6149 - protein, 17 aa, Artificial Sequence
  Synthetically generated peptide
  VARIANT (1)..(17): Xaa = Any Amino Acid
CCEWCCNPXAXCXXTGC

SEQ ID NO: 6150 - protein, 17 aa, Artificial Sequence
  Synthetically generated peptide
  VARIANT (1)..(17): Xaa = Any Amino Acid
CCEWCCNPXAXCXTXGC

SEQ ID NO: 6151 - protein, 17 aa, Artificial Sequence
  Synthetically generated peptide
  VARIANT (1)..(17): Xaa = Any Amino Acid
CCEWCCNPXAXCXTGXC

SEQ ID NO: 6152 - protein, 16 aa, Artificial Sequence
  Synthetically generated peptide
  VARIANT (1)..(16): Xaa = Any Amino Acid
CCEWCCNPXAXCTXGC

SEQ ID NO: 6153 - protein, 17 aa, Artificial Sequence
  Synthetically generated peptide
  VARIANT (1)..(17): Xaa = Any Amino Acid
CCEWCCNPXAXCTXXGC

SEQ ID NO: 6154 - protein, 17 aa, Artificial Sequence
  Synthetically generated peptide
  VARIANT (1)..(17): Xaa = Any Amino Acid
CCEWCCNPXAXCTXGXC

SEQ ID NO: 6155 - protein, 16 aa, Artificial Sequence
  Synthetically generated peptide
  VARIANT (1)..(16): Xaa = Any Amino Acid
CCEWCCNPXAXCTGXC

SEQ ID NO: 6156 - protein, 17 aa, Artificial Sequence
  Synthetically generated peptide
  VARIANT (1)..(17): Xaa = Any Amino Acid
CCEWCCNPXAXCTGXXC

SEQ ID NO: 6157 - protein, 15 aa, Artificial Sequence
  Synthetically generated peptide
  VARIANT (1)..(15): Xaa = Any Amino Acid
CCEWCCNPXACXTGC

SEQ ID NO: 6158 - protein, 16 aa, Artificial Sequence
  Synthetically generated peptide
  VARIANT (1)..(16): Xaa = Any Amino Acid
CCEWCCNPXACXXTGC

SEQ ID NO: 6159 - protein, 17 aa, Artificial Sequence
  Synthetically generated peptide
  VARIANT (1)..(17): Xaa = Any Amino Acid
CCEWCCNPXACXXXTGC

SEQ ID NO: 6160 - protein, 17 aa, Artificial Sequence
  Synthetically generated peptide
  VARIANT (1)..(17): Xaa = Any Amino Acid
CCEWCCNPXACXXTXGC

SEQ ID NO: 6161 - protein, 17 aa, Artificial Sequence
  Synthetically generated peptide
  VARIANT (1)..(17): Xaa = Any Amino Acid
CCEWCCNPXACXXTGXC

SEQ ID NO: 6162 - protein, 16 aa, Artificial Sequence
  Synthetically generated peptide
  VARIANT (1)..(16): Xaa = Any Amino Acid
CCEWCCNPXACXTXGC

SEQ ID NO: 6163 - protein, 17 aa, Artificial Sequence
  Synthetically generated peptide
  VARIANT (1)..(17): Xaa = Any Amino Acid
CCEWCCNPXACXTXXGC

SEQ ID NO: 6164 - protein, 17 aa, Artificial Sequence
  Synthetically generated peptide
  VARIANT (1)..(17): Xaa = Any Amino Acid
CCEWCCNPXACXTXGXC

SEQ ID NO: 6165 - protein, 16 aa, Artificial Sequence
  Synthetically generated peptide
  VARIANT (1)..(16): Xaa = Any Amino Acid
CCEWCCNPXACXTGXC

SEQ ID NO: 6166 - protein, 17 aa, Artificial Sequence
  Synthetically generated peptide
  VARIANT (1)..(17): Xaa = Any Amino Acid
CCEWCCNPXACXTGXXC

SEQ ID NO: 6167 - protein, 15 aa, Artificial Sequence
  Synthetically generated peptide
  VARIANT (1)..(15): Xaa = Any Amino Acid
CCEWCCNPXACTXGC

SEQ ID NO: 6168 - protein, 16 aa, Artificial Sequence
  Synthetically generated peptide
  VARIANT (1)..(16): Xaa = Any Amino Acid
CCEWCCNPXACTXXGC

SEQ ID NO: 6169 - protein, 17 aa, Artificial Sequence
  Synthetically generated peptide
  VARIANT (1)..(17): Xaa = Any Amino Acid
CCEWCCNPXACTXXXGC

SEQ ID NO: 6170 - protein, 17 aa, Artificial Sequence
  Synthetically generated peptide
  VARIANT (1)..(17): Xaa = Any Amino Acid
CCEWCCNPXACTXXGXC

SEQ ID NO: 6171 - protein, 16 aa, Artificial Sequence
  Synthetically generated peptide
  VARIANT (1)..(16): Xaa = Any Amino Acid
CCEWCCNPXACTXGXC

SEQ ID NO: 6172 - protein, 17 aa, Artificial Sequence
  Synthetically generated peptide
  VARIANT (1)..(17): Xaa = Any Amino Acid
CCEWCCNPXACTXGXXC

SEQ ID NO: 6173 - protein, 15 aa, Artificial Sequence
  Synthetically generated peptide
  VARIANT (1)..(15): Xaa = Any Amino Acid
CCEWCCNPXACTGXC

SEQ ID NO: 6174 - protein, 16 aa, Artificial Sequence
  Synthetically generated peptide
  VARIANT (1)..(16): Xaa = Any Amino Acid
CCEWCCNPXACTGXXC

SEQ ID NO: 6175 - protein, 17 aa, Artificial Sequence
  Synthetically generated peptide
  VARIANT (1)..(17): Xaa = Any Amino Acid
CCEWCCNPXACTGXXXC

SEQ ID NO: 6176 - protein, 14 aa, Artificial Sequence
  Synthetically generated peptide
  VARIANT (1)..(14): Xaa = Any Amino Acid
CCEWCCNPAXCTGC

SEQ ID NO: 6177 - protein, 15 aa, Artificial Sequence
  Synthetically generated peptide
  VARIANT (1)..(15): Xaa = Any Amino Acid
CCEWCCNPAXXCTGC

SEQ ID NO: 6178 - protein, 16 aa, Artificial Sequence
  Synthetically generated peptide
  VARIANT (1)..(16): Xaa = Any Amino Acid
CCEWCCNPAXXXCTGC

SEQ ID NO: 6179 - protein, 17 aa, Artificial Sequence
  Synthetically generated peptide
  VARIANT (1)..(17): Xaa = Any Amino Acid
CCEWCCNPAXXXXCTGC

SEQ ID NO: 6180 - protein, 17 aa, Artificial Sequence
  Synthetically generated peptide
  VARIANT (1)..(17): Xaa = Any Amino Acid
CCEWCCNPAXXXCXTGC

SEQ ID NO: 6181 - protein, 17 aa, Artificial Sequence
  Synthetically generated peptide
  VARIANT (1)..(17): Xaa = Any Amino Acid
CCEWCCNPAXXXCTXGC

SEQ ID NO: 6182 - protein, 17 aa, Artificial Sequence
  Synthetically generated peptide
  VARIANT (1)..(17): Xaa = Any Amino Acid
CCEWCCNPAXXXCTGXC

SEQ ID NO: 6183 - protein, 16 aa, Artificial Sequence
  Synthetically generated peptide
  VARIANT (1)..(16): Xaa = Any Amino Acid
CCEWCCNPAXXCXTGC

SEQ ID NO: 6184 - protein, 17 aa, Artificial Sequence
  Synthetically generated peptide
  VARIANT (1)..(17): Xaa = Any Amino Acid
CCEWCCNPAXXCXXTGC

SEQ ID NO: 6185 - protein, 17 aa, Artificial Sequence
  Synthetically generated peptide
  VARIANT (1)..(17): Xaa = Any Amino Acid
CCEWCCNPAXXCXTXGC

SEQ ID NO: 6186 - protein, 17 aa, Artificial Sequence
  Synthetically generated peptide
  VARIANT (1)..(17): Xaa = Any Amino Acid
CCEWCCNPAXXCXTGXC

SEQ ID NO: 6187 - protein, 16 aa, Artificial Sequence
  Synthetically generated peptide
  VARIANT (1)..(16): Xaa = Any Amino Acid
CCEWCCNPAXXCTXGC

SEQ ID NO: 6188 - protein, 17 aa, Artificial Sequence
  Synthetically generated peptide
  VARIANT (1)..(17): Xaa = Any Amino Acid
CCEWCCNPAXXCTXXGC

SEQ ID NO: 6189 - protein, 17 aa, Artificial Sequence
  Synthetically generated peptide
  VARIANT (1)..(17): Xaa = Any Amino Acid
CCEWCCNPAXXCTXGXC

SEQ ID NO: 6190 - protein, 16 aa, Artificial Sequence
  Synthetically generated peptide
  VARIANT (1)..(16): Xaa = Any Amino Acid
CCEWCCNPAXXCTGXC

SEQ ID NO: 6191 - protein, 17 aa, Artificial Sequence
  Synthetically generated peptide
  VARIANT (1)..(17): Xaa = Any Amino Acid
CCEWCCNPAXXCTGXXC

SEQ ID NO: 6192 - protein, 15 aa, Artificial Sequence
  Synthetically generated peptide
  VARIANT (1)..(15): Xaa = Any Amino Acid
CCEWCCNPAXCXTGC

SEQ ID NO: 6193 - protein, 16 aa, Artificial Sequence
  Synthetically generated peptide
  VARIANT (1)..(16): Xaa = Any Amino Acid
CCEWCCNPAXCXXTGC

SEQ ID NO: 6194 - protein, 17 aa, Artificial Sequence
  Synthetically generated peptide
  VARIANT (1)..(17): Xaa = Any Amino Acid
CCEWCCNPAXCXXXTGC

SEQ ID NO: 6195 - protein, 17 aa, Artificial Sequence
  Synthetically generated peptide
  VARIANT (1)..(17): Xaa = Any Amino Acid
CCEWCCNPAXCXXTXGC

SEQ ID NO: 6196 - protein, 17 aa, Artificial Sequence
  Synthetically generated peptide
  VARIANT (1)..(17): Xaa = Any Amino Acid
CCEWCCNPAXCXXTGXC

SEQ ID NO: 6197 - protein, 16 aa, Artificial Sequence
  Synthetically generated peptide
  VARIANT (1)..(16): Xaa = Any Amino Acid
CCEWCCNPAXCXTXGC

SEQ ID NO: 6198 - protein, 17 aa, Artificial Sequence
  Synthetically generated peptide
  VARIANT (1)..(17): Xaa = Any Amino Acid
CCEWCCNPAXCXTXXGC

SEQ ID NO: 6199 - protein, 17 aa, Artificial Sequence
  Synthetically generated peptide
  VARIANT (1)..(17): Xaa = Any Amino Acid
CCEWCCNPAXCXTXGXC

SEQ ID NO: 6200 - protein, 16 aa, Artificial Sequence
  Synthetically generated peptide
  VARIANT (1)..(16): Xaa = Any Amino Acid
CCEWCCNPAXCXTGXC

SEQ ID NO: 6201 - protein, 17 aa, Artificial Sequence
  Synthetically generated peptide
  VARIANT (1)..(17): Xaa = Any Amino Acid
CCEWCCNPAXCXTGXXC

SEQ ID NO: 6202 - protein, 15 aa, Artificial Sequence
  Synthetically generated peptide
  VARIANT (1)..(15): Xaa = Any Amino Acid
CCEWCCNPAXCTXGC

SEQ ID NO: 6203 - protein, 16 aa, Artificial Sequence
  Synthetically generated peptide
  VARIANT (1)..(16): Xaa = Any Amino Acid
CCEWCCNPAXCTXXGC

SEQ ID NO: 6204 - protein, 17 aa, Artificial Sequence
  Synthetically generated peptide
  VARIANT (1)..(17): Xaa = Any Amino Acid
CCEWCCNPAXCTXXXGC

SEQ ID NO: 6205 - protein, 17 aa, Artificial Sequence
  Synthetically generated peptide
  VARIANT (1)..(17): Xaa = Any Amino Acid
CCEWCCNPAXCTXXGXC

SEQ ID NO: 6206 - protein, 16 aa, Artificial Sequence
  Synthetically generated peptide
  VARIANT (1)..(16): Xaa = Any Amino Acid
CCEWCCNPAXCTXGXC

SEQ ID NO: 6207 - protein, 17 aa, Artificial Sequence
  Synthetically generated peptide
  VARIANT (1)..(17): Xaa = Any Amino Acid
CCEWCCNPAXCTXGXXC

SEQ ID NO: 6208 - protein, 15 aa, Artificial Sequence
  Synthetically generated peptide
  VARIANT (1)..(15): Xaa = Any Amino Acid
CCEWCCNPAXCTGXC

SEQ ID NO: 6209 - protein, 16 aa, Artificial Sequence
  Synthetically generated peptide
  VARIANT (1)..(16): Xaa = Any Amino Acid
CCEWCCNPAXCTGXXC

SEQ ID NO: 6210 - protein, 17 aa, Artificial Sequence
  Synthetically generated peptide
  VARIANT (1)..(17): Xaa = Any Amino Acid
CCEWCCNPAXCTGXXXC

SEQ ID NO: 6211 - protein, 14 aa, Artificial Sequence
  Synthetically generated peptide
  VARIANT (1)..(14): Xaa = Any Amino Acid
CCEWCCNPACXTGC

SEQ ID NO: 6212 - protein, 15 aa, Artificial Sequence
  Synthetically generated peptide
  VARIANT (1)..(15): Xaa = Any Amino Acid
CCEWCCNPACXXTGC

SEQ ID NO: 6213 - protein, 16 aa, Artificial Sequence
  Synthetically generated peptide
  VARIANT (1)..(16): Xaa = Any Amino Acid
CCEWCCNPACXXXTGC

SEQ ID NO: 6214 - protein, 17 aa, Artificial Sequence
  Synthetically generated peptide
  VARIANT (1)..(17): Xaa = Any Amino Acid
CCEWCCNPACXXXXTGC

SEQ ID NO: 6215 - protein, 17 aa, Artificial Sequence
  Synthetically generated peptide
  VARIANT (1)..(17): Xaa = Any Amino Acid
CCEWCCNPACXXXTXGC

SEQ ID NO: 6216 - protein, 17 aa, Artificial Sequence
  Synthetically generated peptide
  VARIANT (1)..(17): Xaa = Any Amino Acid
CCEWCCNPACXXXTGXC

SEQ ID NO: 6217 - protein, 16 aa, Artificial Sequence
  Synthetically generated peptide
  VARIANT (1)..(16): Xaa = Any Amino Acid
CCEWCCNPACXXTXGC

SEQ ID NO: 6218 - protein, 17 aa, Artificial Sequence
  Synthetically generated peptide
  VARIANT (1)..(17): Xaa = Any Amino Acid
CCEWCCNPACXXTXXGC

SEQ ID NO: 6219 - protein, 17 aa, Artificial Sequence
  Synthetically generated peptide
  VARIANT (1)..(17): Xaa = Any Amino Acid
CCEWCCNPACXXTXGXC

SEQ ID NO: 6220 - protein, 16 aa, Artificial Sequence
  Synthetically generated peptide
  VARIANT (1)..(16): Xaa = Any Amino Acid
CCEWCCNPACXXTGXC

SEQ ID NO: 6221 - protein, 17 aa, Artificial Sequence
  Synthetically generated peptide
  VARIANT (1)..(17): Xaa = Any Amino Acid
CCEWCCNPACXXTGXXC

SEQ ID NO: 6222 - protein, 15 aa, Artificial Sequence
  Synthetically generated peptide
  VARIANT (1)..(15): Xaa = Any Amino Acid
CCEWCCNPACXTXGC

SEQ ID NO: 6223 - protein, 16 aa, Artificial Sequence
  Synthetically generated peptide
  VARIANT (1)..(16): Xaa = Any Amino Acid
CCEWCCNPACXTXXGC

SEQ ID NO: 6224 - protein, 17 aa, Artificial Sequence
  Synthetically generated peptide
  VARIANT (1)..(17): Xaa = Any Amino Acid
CCEWCCNPACXTXXXGC

SEQ ID NO: 6225 - protein, 17 aa, Artificial Sequence
  Synthetically generated peptide
  VARIANT (1)..(17): Xaa = Any Amino Acid
CCEWCCNPACXTXXGXC

SEQ ID NO: 6226 - protein, 16 aa, Artificial Sequence
  Synthetically generated peptide
  VARIANT (1)..(16): Xaa = Any Amino Acid
CCEWCCNPACXTXGXC

SEQ ID NO: 6227 - protein, 17 aa, Artificial Sequence
  Synthetically generated peptide
  VARIANT (1)..(17): Xaa = Any Amino Acid
CCEWCCNPACXTXGXXC

SEQ ID NO: 6228 - protein, 15 aa, Artificial Sequence
  Synthetically generated peptide
  VARIANT (1)..(15): Xaa = Any Amino Acid
CCEWCCNPACXTGXC

SEQ ID NO: 6229 - protein, 16 aa, Artificial Sequence
  Synthetically generated peptide
  VARIANT (1)..(16): Xaa = Any Amino Acid
CCEWCCNPACXTGXXC

SEQ ID NO: 6230 - protein, 17 aa, Artificial Sequence
  Synthetically generated peptide
  VARIANT (1)..(17): Xaa = Any Amino Acid
CCEWCCNPACXTGXXXC

SEQ ID NO: 6231 - protein, 14 aa, Artificial Sequence
  Synthetically generated peptide
  VARIANT (1)..(14): Xaa = Any Amino Acid
CCEWCCNPACTXGC

SEQ ID NO: 6232 - protein, 15 aa, Artificial Sequence
  Synthetically generated peptide
  VARIANT (1)..(15): Xaa = Any Amino Acid
CCEWCCNPACTXXGC

SEQ ID NO: 6233 - protein, 16 aa, Artificial Sequence
  Synthetically generated peptide
  VARIANT (1)..(16): Xaa = Any Amino Acid
CCEWCCNPACTXXXGC

SEQ ID NO: 6234 - protein, 17 aa, Artificial Sequence
  Synthetically generated peptide
  VARIANT (1)..(17): Xaa = Any Amino Acid
CCEWCCNPACTXXXXGC

SEQ ID NO: 6235 - protein, 17 aa, Artificial Sequence
  Synthetically generated peptide
  VARIANT (1)..(17): Xaa = Any Amino Acid
CCEWCCNPACTXXXGXC

SEQ ID NO: 6236 - protein, 16 aa, Artificial Sequence
  Synthetically generated peptide
  VARIANT (1)..(16): Xaa = Any Amino Acid
CCEWCCNPACTXXGXC

SEQ ID NO: 6237 - protein, 17 aa, Artificial Sequence
  Synthetically generated peptide
  VARIANT (1)..(17): Xaa = Any Amino Acid
CCEWCCNPACTXXGXXC

SEQ ID NO: 6238 - protein, 15 aa, Artificial Sequence
  Synthetically generated peptide
  VARIANT (1)..(15): Xaa = Any Amino Acid
CCEWCCNPACTXGXC

SEQ ID NO: 6239 - protein, 16 aa, Artificial Sequence
  Synthetically generated peptide
  VARIANT (1)..(16): Xaa = Any Amino Acid
CCEWCCNPACTXGXXC

SEQ ID NO: 6240 - protein, 17 aa, Artificial Sequence
  Synthetically generated peptide
  VARIANT (1)..(17): Xaa = Any Amino Acid
CCEWCCNPACTXGXXXC

SEQ ID NO: 6241 - protein, 14 aa, Artificial Sequence
  Synthetically generated peptide
  VARIANT (1)..(14): Xaa = Any Amino Acid
CCEWCCNPACTGXC

SEQ ID NO: 6242 - protein, 15 aa, Artificial Sequence
  Synthetically generated peptide
  VARIANT (1)..(15): Xaa = Any Amino Acid
CCEWCCNPACTGXXC

SEQ ID NO: 6243 - protein, 16 aa, Artificial Sequence
  Synthetically generated peptide
  VARIANT (1)..(16): Xaa = Any Amino Acid
CCEWCCNPACTGXXXC

SEQ ID NO: 6244 - protein, 17 aa, Artificial Sequence
  Synthetically generated peptide
  VARIANT (1)..(17): Xaa = Any Amino Acid
CCEWCCNPACTGXXXXC

SEQ ID NO: 6245 - protein, 14 aa, Artificial Sequence
  Synthetically generated peptide
  VARIANT (1)..(14): Xaa = Any Amino Acid
CCXEFCCNPACTGC

SEQ ID NO: 6246 - protein, 15 aa, Artificial Sequence
  Synthetically generated peptide
  VARIANT (1)..(15): Xaa = Any Amino Acid
CCXXEFCCNPACTGC

SEQ ID NO: 6247 - protein, 16 aa, Artificial Sequence
  Synthetically generated peptide
  VARIANT (1)..(16): Xaa = Any Amino Acid
CCXXXEFCCNPACTGC

SEQ ID NO: 6248 - protein, 17 aa, Artificial Sequence
  Synthetically generated peptide
  VARIANT (1)..(17): Xaa = Any Amino Acid
CCXXXXEFCCNPACTGC

SEQ ID NO: 6249 - protein, 17 aa, Artificial Sequence
  Synthetically generated peptide
  VARIANT (1)..(17): Xaa = Any Amino Acid
CCXXXEXFCCNPACTGC

SEQ ID NO: 6250 - protein, 17 aa, Artificial Sequence
  Synthetically generated peptide
  VARIANT (1)..(17): Xaa = Any Amino Acid
CCXXXEFXCCNPACTGC

SEQ ID NO: 6251 - protein, 17 aa, Artificial Sequence
  Synthetically generated peptide
  VARIANT (1)..(17): Xaa = Any Amino Acid
CCXXXEFCCXNPACTGC

SEQ ID NO: 6252 - protein, 17 aa, Artificial Sequence
  Synthetically generated peptide
  VARIANT (1)..(17): Xaa = Any Amino Acid
CCXXXEFCCNXPACTGC

SEQ ID NO: 6253 - protein, 17 aa, Artificial Sequence
  Synthetically generated peptide
  VARIANT (1)..(17): Xaa = Any Amino Acid
CCXXXEFCCNPXACTGC

SEQ ID NO: 6254 - protein, 17 aa, Artificial Sequence
  Synthetically generated peptide
  VARIANT (1)..(17): Xaa = Any Amino Acid
CCXXXEFCCNPAXCTGC

SEQ ID NO: 6255 - protein, 17 aa, Artificial Sequence
  Synthetically generated peptide
  VARIANT (1)..(17): Xaa = Any Amino Acid
CCXXXEFCCNPACXTGC

SEQ ID NO: 6256 - protein, 17 aa, Artificial Sequence
  Synthetically generated peptide
  VARIANT (1)..(17): Xaa = Any Amino Acid
CCXXXEFCCNPACTXGC

SEQ ID NO: 6257 - protein, 17 aa, Artificial Sequence
  Synthetically generated peptide
  VARIANT (1)..(17): Xaa = Any Amino Acid
CCXXXEFCCNPACTGXC

SEQ ID NO: 6258 - protein, 16 aa, Artificial Sequence
  Synthetically generated peptide
  VARIANT (1)..(16): Xaa = Any Amino Acid
CCXXEXFCCNPACTGC

SEQ ID NO: 6259 - protein, 17 aa, Artificial Sequence
  Synthetically generated peptide
  VARIANT (1)..(17): Xaa = Any Amino Acid
CCXXEXXFCCNPACTGC

SEQ ID NO: 6260 - protein, 17 aa, Artificial Sequence
  Synthetically generated peptide
  VARIANT (1)..(17): Xaa = Any Amino Acid
CCXXEXFXCCNPACTGC

SEQ ID NO: 6261 - protein, 17 aa, Artificial Sequence
  Synthetically generated peptide
  VARIANT (1)..(17): Xaa = Any Amino Acid
CCXXEXFCCXNPACTGC

SEQ ID NO: 6262 - protein, 17 aa, Artificial Sequence
  Synthetically generated peptide
  VARIANT (1)..(17): Xaa = Any Amino Acid
CCXXEXFCCNXPACTGC

SEQ ID NO: 6263 - protein, 17 aa, Artificial Sequence
  Synthetically generated peptide
  VARIANT (1)..(17): Xaa = Any Amino Acid
CCXXEXFCCNPXACTGC

SEQ ID NO: 6264 - protein, 17 aa, Artificial Sequence
  Synthetically generated peptide
  VARIANT (1)..(17): Xaa = Any Amino Acid
CCXXEXFCCNPAXCTGC

SEQ ID NO: 6265 - protein, 17 aa, Artificial Sequence
  Synthetically generated peptide
  VARIANT (1)..(17): Xaa = Any Amino Acid
CCXXEXFCCNPACXTGC

SEQ ID NO: 6266 - protein, 17 aa, Artificial Sequence
  Synthetically generated peptide
  VARIANT (1)..(17): Xaa = Any Amino Acid
CCXXEXFCCNPACTXGC

SEQ ID NO: 6267 - protein, 17 aa, Artificial Sequence
  Synthetically generated peptide
  VARIANT (1)..(17): Xaa = Any Amino Acid
CCXXEXFCCNPACTGXC

SEQ ID NO: 6268 - protein, 16 aa, Artificial Sequence
  Synthetically generated peptide
  VARIANT (1)..(16): Xaa = Any Amino Acid
CCXXEFXCCNPACTGC

SEQ ID NO: 6269 - protein, 17 aa, Artificial Sequence
  Synthetically generated peptide
  VARIANT (1)..(17): Xaa = Any Amino Acid
CCXXEFXXCCNPACTGC

SEQ ID NO: 6270 - protein, 17 aa, Artificial Sequence
  Synthetically generated peptide
  VARIANT (1)..(17): Xaa = Any Amino Acid
CCXXEFXCCXNPACTGC

SEQ ID NO: 6271 - protein, 17 aa, Artificial Sequence
  Synthetically generated peptide
  VARIANT (1)..(17): Xaa = Any Amino Acid
CCXXEFXCCNXPACTGC

SEQ ID NO: 6272 - protein, 17 aa, Artificial Sequence
  Synthetically generated peptide
  VARIANT (1)..(17): Xaa = Any Amino Acid
CCXXEFXCCNPXACTGC

SEQ ID NO: 6273 - protein, 17 aa, Artificial Sequence
  Synthetically generated peptide
  VARIANT (1)..(17): Xaa = Any Amino Acid
CCXXEFXCCNPAXCTGC

SEQ ID NO: 6274 - protein, 17 aa, Artificial Sequence
  Synthetically generated peptide
  VARIANT (1)..(17): Xaa = Any Amino Acid
CCXXEFXCCNPACXTGC

SEQ ID NO: 6275 - protein, 17 aa, Artificial Sequence
  Synthetically generated peptide
  VARIANT (1)..(17): Xaa = Any Amino Acid
CCXXEFXCCNPACTXGC

SEQ ID NO: 6276 - protein, 17 aa, Artificial Sequence
  Synthetically generated peptide
  VARIANT (1)..(17): Xaa = Any Amino Acid
CCXXEFXCCNPACTGXC

SEQ ID NO: 6277 - protein, 16 aa, Artificial Sequence
  Synthetically generated peptide
  VARIANT (1)..(16): Xaa = Any Amino Acid
CCXXEFCCXNPACTGC

SEQ ID NO: 6278 - protein, 17 aa, Artificial Sequence
  Synthetically generated peptide
  VARIANT (1)..(17): Xaa = Any Amino Acid
CCXXEFCCXXNPACTGC

SEQ ID NO: 6279 - protein, 17 aa, Artificial Sequence
  Synthetically generated peptide
  VARIANT (1)..(17): Xaa = Any Amino Acid
CCXXEFCCXNXPACTGC

SEQ ID NO: 6280 - protein, 17 aa, Artificial Sequence
  Synthetically generated peptide
  VARIANT (1)..(17): Xaa = Any Amino Acid
CCXXEFCCXNPXACTGC

SEQ ID NO: 6281 - protein, 17 aa, Artificial Sequence
  Synthetically generated peptide
  VARIANT (1)..(17): Xaa = Any Amino Acid
CCXXEFCCXNPAXCTGC

SEQ ID NO: 6282 - protein, 17 aa, Artificial Sequence
  Synthetically generated peptide
  VARIANT (1)..(17): Xaa = Any Amino Acid
CCXXEFCCXNPACXTGC

SEQ ID NO: 6283 - protein, 17 aa, Artificial Sequence
  Synthetically generated peptide
  VARIANT (1)..(17): Xaa = Any Amino Acid
CCXXEFCCXNPACTXGC

SEQ ID NO: 6284 - protein, 17 aa, Artificial Sequence
  Synthetically generated peptide
  VARIANT (1)..(17): Xaa = Any Amino Acid
CCXXEFCCXNPACTGXC

SEQ ID NO: 6285 - protein, 16 aa, Artificial Sequence
  Synthetically generated peptide
  VARIANT (1)..(16): Xaa = Any Amino Acid
CCXXEFCCNXPACTGC

SEQ ID NO: 6286 - protein, 17 aa, Artificial Sequence
  Synthetically generated peptide
  VARIANT (1)..(17): Xaa = Any Amino Acid
CCXXEFCCNXXPACTGC

SEQ ID NO: 6287 - protein, 17 aa, Artificial Sequence
  Synthetically generated peptide
  VARIANT (1)..(17): Xaa = Any Amino Acid
CCXXEFCCNXPXACTGC

SEQ ID NO: 6288 - protein, 17 aa, Artificial Sequence
  Synthetically generated peptide
  VARIANT (1)..(17): Xaa = Any Amino Acid
CCXXEFCCNXPAXCTGC

SEQ ID NO: 6289 - protein, 17 aa, Artificial Sequence
  Synthetically generated peptide
  VARIANT (1)..(17): Xaa = Any Amino Acid
CCXXEFCCNXPACXTGC

SEQ ID NO: 6290 - protein, 17 aa, Artificial Sequence
  Synthetically generated peptide
  VARIANT (1)..(17): Xaa = Any Amino Acid
CCXXEFCCNXPACTXGC

SEQ ID NO: 6291 - protein, 17 aa, Artificial Sequence
  Synthetically generated peptide
  VARIANT (1)..(17): Xaa = Any Amino Acid
CCXXEFCCNXPACTGXC

SEQ ID NO: 6292 - protein, 16 aa, Artificial Sequence
  Synthetically generated peptide
  VARIANT (1)..(16): Xaa = Any Amino Acid
CCXXEFCCNPXACTGC

SEQ ID NO: 6293 - protein, 17 aa, Artificial Sequence
  Synthetically generated peptide
  VARIANT (1)..(17): Xaa = Any Amino Acid
CCXXEFCCNPXXACTGC

SEQ ID NO: 6294 - protein, 17 aa, Artificial Sequence
  Synthetically generated peptide
  VARIANT (1)..(17): Xaa = Any Amino Acid
CCXXEFCCNPXAXCTGC

SEQ ID NO: 6295 - protein, 17 aa, Artificial Sequence
  Synthetically generated peptide
  VARIANT (1)..(17): Xaa = Any Amino Acid
CCXXEFCCNPXACXTGC

SEQ ID NO: 6296 - protein, 17 aa, Artificial Sequence
  Synthetically generated peptide
  VARIANT (1)..(17): Xaa = Any Amino Acid
CCXXEFCCNPXACTXGC

SEQ ID NO: 6297 - protein, 17 aa, Artificial Sequence
  Synthetically generated peptide
  VARIANT (1)..(17): Xaa = Any Amino Acid
CCXXEFCCNPXACTGXC

SEQ ID NO: 6298 - protein, 16 aa, Artificial Sequence
  Synthetically generated peptide
  VARIANT (1)..(16): Xaa = Any Amino Acid
CCXXEFCCNPAXCTGC

SEQ ID NO: 6299 - protein, 17 aa, Artificial Sequence
  Synthetically generated peptide
  VARIANT (1)..(17): Xaa = Any Amino Acid
CCXXEFCCNPAXXCTGC

SEQ ID NO: 6300 - protein, 17 aa, Artificial Sequence
  Synthetically generated peptide
  VARIANT (1)..(17): Xaa = Any Amino Acid
CCXXEFCCNPAXCXTGC

SEQ ID NO: 6301 - protein, 17 aa, Artificial Sequence
  Synthetically generated peptide
  VARIANT (1)..(17): Xaa = Any Amino Acid
CCXXEFCCNPAXCTXGC

SEQ ID NO: 6302 - protein, 17 aa, Artificial Sequence
  Synthetically generated peptide
  VARIANT (1)..(17): Xaa = Any Amino Acid
CCXXEFCCNPAXCTGXC

SEQ ID NO: 6303 - protein, 16 aa, Artificial Sequence
  Synthetically generated peptide
  VARIANT (1)..(16): Xaa = Any Amino Acid
CCXXEFCCNPACXTGC

SEQ ID NO: 6304 - protein, 17 aa, Artificial Sequence
  Synthetically generated peptide
  VARIANT (1)..(17): Xaa = Any Amino Acid
CCXXEFCCNPACXXTGC

SEQ ID NO: 6305 - protein, 17 aa, Artificial Sequence
  Synthetically generated peptide
  VARIANT (1)..(17): Xaa = Any Amino Acid
CCXXEFCCNPACXTXGC

SEQ ID NO: 6306 - protein, 17 aa, Artificial Sequence
  Synthetically generated peptide
  VARIANT (1)..(17): Xaa = Any Amino Acid
CCXXEFCCNPACXTGXC

SEQ ID NO: 6307 - protein, 16 aa, Artificial Sequence
  Synthetically generated peptide
  VARIANT (1)..(16): Xaa = Any Amino Acid
CCXXEFCCNPACTXGC

SEQ ID NO: 6308 - protein, 17 aa, Artificial Sequence
  Synthetically generated peptide
  VARIANT (1)..(17): Xaa = Any Amino Acid
CCXXEFCCNPACTXXGC

SEQ ID NO: 6309 - protein, 17 aa, Artificial Sequence
  Synthetically generated peptide
  VARIANT (1)..(17): Xaa = Any Amino Acid
CCXXEFCCNPACTXGXC

SEQ ID NO: 6310 - protein, 16 aa, Artificial Sequence
  Synthetically generated peptide
  VARIANT (1)..(16): Xaa = Any Amino Acid
CCXXEFCCNPACTGXC

SEQ ID NO: 6311 - protein, 17 aa, Artificial Sequence
  Synthetically generated peptide
  VARIANT (1)..(17): Xaa = Any Amino Acid
CCXXEFCCNPACTGXXC

SEQ ID NO: 6312 - protein, 15 aa, Artificial Sequence
  Synthetically generated peptide
  VARIANT (1)..(15): Xaa = Any Amino Acid
CCXEXFCCNPACTGC

SEQ ID NO: 6313 - protein, 16 aa, Artificial Sequence
  Synthetically generated peptide
  VARIANT (1)..(16): Xaa = Any Amino Acid
CCXEXXFCCNPACTGC

SEQ ID NO: 6314 - protein, 17 aa, Artificial Sequence
  Synthetically generated peptide
  VARIANT (1)..(17): Xaa = Any Amino Acid
CCXEXXXFCCNPACTGC

SEQ ID NO: 6315 - protein, 17 aa, Artificial Sequence
  Synthetically generated peptide
  VARIANT (1)..(17): Xaa = Any Amino Acid
CCXEXXFXCCNPACTGC

SEQ ID NO: 6316 - protein, 17 aa, Artificial Sequence
  Synthetically generated peptide
  VARIANT (1)..(17): Xaa = Any Amino Acid
CCXEXXFCCXNPACTGC

SEQ ID NO: 6317 - protein, 17 aa, Artificial Sequence
  Synthetically generated peptide
  VARIANT (1)..(17): Xaa = Any Amino Acid
CCXEXXFCCNXPACTGC

SEQ ID NO: 6318 - protein, 17 aa, Artificial Sequence
  Synthetically generated peptide
  VARIANT (1)..(17): Xaa = Any Amino Acid
CCXEXXFCCNPXACTGC

SEQ ID NO: 6319 - protein, 17 aa, Artificial Sequence
  Synthetically generated peptide
  VARIANT (1)..(17): Xaa = Any Amino Acid
CCXEXXFCCNPAXCTGC

SEQ ID NO: 6320 - protein, 17 aa, Artificial Sequence
  Synthetically generated peptide
  VARIANT (1)..(17): Xaa = Any Amino Acid
CCXEXXFCCNPACXTGC

SEQ ID NO: 6321 - protein, 17 aa, Artificial Sequence
  Synthetically generated peptide
  VARIANT (1)..(17): Xaa = Any Amino Acid
CCXEXXFCCNPACTXGC

SEQ ID NO: 6322 - protein, 17 aa, Artificial Sequence
  Synthetically generated peptide
  VARIANT (1)..(17): Xaa = Any Amino Acid
CCXEXXFCCNPACTGXC

SEQ ID NO: 6323 - protein, 16 aa, Artificial Sequence
  Synthetically generated peptide
  VARIANT (1)..(16): Xaa = Any Amino Acid
CCXEXFXCCNPACTGC

SEQ ID NO: 6324 - protein, 17 aa, Artificial Sequence
  Synthetically generated peptide
  VARIANT (1)..(17): Xaa = Any Amino Acid
CCXEXFXXCCNPACTGC

SEQ ID NO: 6325 - protein, 17 aa, Artificial Sequence
  Synthetically generated peptide
  VARIANT (1)..(17): Xaa = Any Amino Acid
CCXEXFXCCXNPACTGC

SEQ ID NO: 6326 - protein, 17 aa, Artificial Sequence
  Synthetically generated peptide
  VARIANT (1)..(17): Xaa = Any Amino Acid
CCXEXFXCCNXPACTGC

SEQ ID NO: 6327 - protein, 17 aa, Artificial Sequence
  Synthetically generated peptide
  VARIANT (1)..(17): Xaa = Any Amino Acid
CCXEXFXCCNPXACTGC

SEQ ID NO: 6328 - protein, 17 aa, Artificial Sequence
  Synthetically generated peptide
  VARIANT (1)..(17): Xaa = Any Amino Acid
CCXEXFXCCNPAXCTGC

SEQ ID NO: 6329 - protein, 17 aa, Artificial Sequence
  Synthetically generated peptide
  VARIANT (1)..(17): Xaa = Any Amino Acid
CCXEXFXCCNPACXTGC

SEQ ID NO: 6330 - protein, 17 aa, Artificial Sequence
  Synthetically generated peptide
  VARIANT (1)..(17): Xaa = Any Amino Acid
CCXEXFXCCNPACTXGC

SEQ ID NO: 6331 - protein, 17 aa, Artificial Sequence
  Synthetically generated peptide
  VARIANT (1)..(17): Xaa = Any Amino Acid
CCXEXFXCCNPACTGXC

SEQ ID NO: 6332 - protein, 16 aa, Artificial Sequence
  Synthetically generated peptide
  VARIANT (1)..(16): Xaa = Any Amino Acid
CCXEXFCCXNPACTGC

SEQ ID NO: 6333 - protein, 17 aa, Artificial Sequence
  Synthetically generated peptide
  VARIANT (1)..(17): Xaa = Any Amino Acid
CCXEXFCCXXNPACTGC

SEQ ID NO: 6334 - protein, 17 aa, Artificial Sequence
  Synthetically generated peptide
  VARIANT (1)..(17): Xaa = Any Amino Acid
CCXEXFCCXNXPACTGC

SEQ ID NO: 6335 - protein, 17 aa, Artificial Sequence
  Synthetically generated peptide
  VARIANT (1)..(17): Xaa = Any Amino Acid
CCXEXFCCXNPXACTGC

SEQ ID NO: 6336 - protein, 17 aa, Artificial Sequence
  Synthetically generated peptide
  VARIANT (1)..(17): Xaa = Any Amino Acid
CCXEXFCCXNPAXCTGC

SEQ ID NO: 6337 - protein, 17 aa, Artificial Sequence
  Synthetically generated peptide
  VARIANT (1)..(17): Xaa = Any Amino Acid
CCXEXFCCXNPACXTGC

SEQ ID NO: 6338 - protein, 17 aa, Artificial Sequence
  Synthetically generated peptide
  VARIANT (1)..(17): Xaa = Any Amino Acid
CCXEXFCCXNPACTXGC

SEQ ID NO: 6339 - protein, 17 aa, Artificial Sequence
  Synthetically generated peptide
  VARIANT (1)..(17): Xaa = Any Amino Acid
CCXEXFCCXNPACTGXC

SEQ ID NO: 6340 - protein, 16 aa, Artificial Sequence
  Synthetically generated peptide
  VARIANT (1)..(16): Xaa = Any Amino Acid
CCXEXFCCNXPACTGC

SEQ ID NO: 6341 - protein, 17 aa, Artificial Sequence
  Synthetically generated peptide
  VARIANT (1)..(17): Xaa = Any Amino Acid
CCXEXFCCNXXPACTGC

SEQ ID NO: 6342 - protein, 17 aa, Artificial Sequence
  Synthetically generated peptide
  VARIANT (1)..(17): Xaa = Any Amino Acid
CCXEXFCCNXPXACTGC

SEQ ID NO: 6343 - protein, 17 aa, Artificial Sequence
  Synthetically generated peptide
  VARIANT (1)..(17): Xaa = Any Amino Acid
CCXEXFCCNXPAXCTGC

SEQ ID NO: 6344 - protein, 17 aa, Artificial Sequence
  Synthetically generated peptide
  VARIANT (1)..(17): Xaa = Any Amino Acid
CCXEXFCCNXPACXTGC

SEQ ID NO: 6345 - protein, 17 aa, Artificial Sequence
  Synthetically generated peptide
  VARIANT (1)..(17): Xaa = Any Amino Acid
CCXEXFCCNXPACTXGC

SEQ ID NO: 6346 - protein, 17 aa, Artificial Sequence
  Synthetically generated peptide
  VARIANT (1)..(17): Xaa = Any Amino Acid
CCXEXFCCNXPACTGXC

SEQ ID NO: 6347 - protein, 16 aa, Artificial Sequence
  Synthetically generated peptide
  VARIANT (1)..(16): Xaa = Any Amino Acid
CCXEXFCCNPXACTGC

SEQ ID NO: 6348 - protein, 17 aa, Artificial Sequence
  Synthetically generated peptide
  VARIANT (1)..(17): Xaa = Any Amino Acid
CCXEXFCCNPXXACTGC

SEQ ID NO: 6349 - protein, 17 aa, Artificial Sequence
  Synthetically generated peptide
  VARIANT (1)..(17): Xaa = Any Amino Acid
CCXEXFCCNPXAXCTGC

SEQ ID NO: 6350 - protein, 17 aa, Artificial Sequence
  Synthetically generated peptide
  VARIANT (1)..(17): Xaa = Any Amino Acid
CCXEXFCCNPXACXTGC

SEQ ID NO: 6351 - protein, 17 aa, Artificial Sequence
  Synthetically generated peptide
  VARIANT (1)..(17): Xaa = Any Amino Acid
CCXEXFCCNPXACTXGC

SEQ ID NO: 6352 - protein, 17 aa, Artificial Sequence
  Synthetically generated peptide
  VARIANT (1)..(17): Xaa = Any Amino Acid
CCXEXFCCNPXACTGXC

SEQ ID NO: 6353 - protein, 16 aa, Artificial Sequence
  Synthetically generated peptide
  VARIANT (1)..(16): Xaa = Any Amino Acid
CCXEXFCCNPAXCTGC

SEQ ID NO: 6354 - protein, 17 aa, Artificial Sequence
  Synthetically generated peptide
  VARIANT (1)..(17): Xaa = Any Amino Acid
CCXEXFCCNPAXXCTGC

SEQ ID NO: 6355 - protein, 17 aa, Artificial Sequence
  Synthetically generated peptide
  VARIANT (1)..(17): Xaa = Any Amino Acid
CCXEXFCCNPAXCXTGC

SEQ ID NO: 6356 - protein, 17 aa, Artificial Sequence
  Synthetically generated peptide
  VARIANT (1)..(17): Xaa = Any Amino Acid
CCXEXFCCNPAXCTXGC

SEQ ID NO: 6357 - protein, 17 aa, Artificial Sequence
  Synthetically generated peptide
  VARIANT (1)..(17): Xaa = Any Amino Acid
CCXEXFCCNPAXCTGXC

SEQ ID NO: 6358 - protein, 16 aa, Artificial Sequence
  Synthetically generated peptide
  VARIANT (1)..(16): Xaa = Any Amino Acid
CCXEXFCCNPACXTGC

SEQ ID NO: 6359 - protein, 17 aa, Artificial Sequence
  Synthetically generated peptide
  VARIANT (1)..(17): Xaa = Any Amino Acid
CCXEXFCCNPACXXTGC

SEQ ID NO: 6360 - protein, 17 aa, Artificial Sequence
  Synthetically generated peptide
  VARIANT (1)..(17): Xaa = Any Amino Acid
CCXEXFCCNPACXTXGC

SEQ ID NO: 6361 - protein, 17 aa, Artificial Sequence
  Synthetically generated peptide
  VARIANT (1)..(17): Xaa = Any Amino Acid
CCXEXFCCNPACXTGXC

SEQ ID NO: 6362 - protein, 16 aa, Artificial Sequence
  Synthetically generated peptide
  VARIANT (1)..(16): Xaa = Any Amino Acid
CCXEXFCCNPACTXGC

SEQ ID NO: 6363 - protein, 17 aa, Artificial Sequence
  Synthetically generated peptide
  VARIANT (1)..(17): Xaa = Any Amino Acid
CCXEXFCCNPACTXXGC

SEQ ID NO: 6364 - protein, 17 aa, Artificial Sequence
  Synthetically generated peptide
  VARIANT (1)..(17): Xaa = Any Amino Acid
CCXEXFCCNPACTXGXC

SEQ ID NO: 6365 - protein, 16 aa, Artificial Sequence
  Synthetically generated peptide
  VARIANT (1)..(16): Xaa = Any Amino Acid
CCXEXFCCNPACTGXC

SEQ ID NO: 6366 - protein, 17 aa, Artificial Sequence
  Synthetically generated peptide
  VARIANT (1)..(17): Xaa = Any Amino Acid
CCXEXFCCNPACTGXXC

SEQ ID NO: 6367 - protein, 15 aa, Artificial Sequence
  Synthetically generated peptide
  VARIANT (1)..(15): Xaa = Any Amino Acid
CCXEFXCCNPACTGC

SEQ ID NO: 6368 - protein, 16 aa, Artificial Sequence
  Synthetically generated peptide
  VARIANT (1)..(16): Xaa = Any Amino Acid
CCXEFXXCCNPACTGC

SEQ ID NO: 6369 - protein, 17 aa, Artificial Sequence
  Synthetically generated peptide
  VARIANT (1)..(17): Xaa = Any Amino Acid
CCXEFXXXCCNPACTGC

SEQ ID NO: 6370 - protein, 17 aa, Artificial Sequence
  Synthetically generated peptide
  VARIANT (1)..(17): Xaa = Any Amino Acid
CCXEFXXCCXNPACTGC

SEQ ID NO: 6371 - protein, 17 aa, Artificial Sequence
  Synthetically generated peptide
  VARIANT (1)..(17): Xaa = Any Amino Acid
CCXEFXXCCNXPACTGC

SEQ ID NO: 6372 - protein, 17 aa, Artificial Sequence
  Synthetically generated peptide
  VARIANT (1)..(17): Xaa = Any Amino Acid
CCXEFXXCCNPXACTGC

SEQ ID NO: 6373 - protein, 17 aa, Artificial Sequence
  Synthetically generated peptide
  VARIANT (1)..(17): Xaa = Any Amino Acid
CCXEFXXCCNPAXCTGC

SEQ ID NO: 6374 - protein, 17 aa, Artificial Sequence
  Synthetically generated peptide
  VARIANT (1)..(17): Xaa = Any Amino Acid
CCXEFXXCCNPACXTGC

SEQ ID NO: 6375 - protein, 17 aa, Artificial Sequence
  Synthetically generated peptide
  VARIANT (1)..(17): Xaa = Any Amino Acid
CCXEFXXCCNPACTXGC

SEQ ID NO: 6376 - protein, 17 aa, Artificial Sequence
  Synthetically generated peptide
  VARIANT (1)..(17): Xaa = Any Amino Acid
CCXEFXXCCNPACTGXC

SEQ ID NO: 6377 - protein, 16 aa, Artificial Sequence
  Synthetically generated peptide
  VARIANT (1)..(16): Xaa = Any Amino Acid
CCXEFXCCXNPACTGC

SEQ ID NO: 6378 - protein, 17 aa, Artificial Sequence
  Synthetically generated peptide
  VARIANT (1)..(17): Xaa = Any Amino Acid
CCXEFXCCXXNPACTGC

SEQ ID NO: 6379 - protein, 17 aa, Artificial Sequence
  Synthetically generated peptide
  VARIANT (1)..(17): Xaa = Any Amino Acid
CCXEFXCCXNXPACTGC

SEQ ID NO: 6380 - protein, 17 aa, Artificial Sequence
  Synthetically generated peptide
  VARIANT (1)..(17): Xaa = Any Amino Acid
CCXEFXCCXNPXACTGC

SEQ ID NO: 6381 - protein, 17 aa, Artificial Sequence
  Synthetically generated peptide
  VARIANT (1)..(17): Xaa = Any Amino Acid
CCXEFXCCXNPAXCTGC

SEQ ID NO: 6382 - protein, 17 aa, Artificial Sequence
  Synthetically generated peptide
  VARIANT (1)..(17): Xaa = Any Amino Acid
CCXEFXCCXNPACXTGC

SEQ ID NO: 6383 - protein, 17 aa, Artificial Sequence
  Synthetically generated peptide
  VARIANT (1)..(17): Xaa = Any Amino Acid
CCXEFXCCXNPACTXGC

SEQ ID NO: 6384 - protein, 17 aa, Artificial Sequence
  Synthetically generated peptide
  VARIANT (1)..(17): Xaa = Any Amino Acid
CCXEFXCCXNPACTGXC

SEQ ID NO: 6385 - protein, 16 aa, Artificial Sequence
  Synthetically generated peptide
  VARIANT (1)..(16): Xaa = Any Amino Acid
CCXEFXCCNXPACTGC

SEQ ID NO: 6386 - protein, 17 aa, Artificial Sequence
  Synthetically generated peptide
  VARIANT (1)..(17): Xaa = Any Amino Acid
CCXEFXCCNXXPACTGC

SEQ ID NO: 6387 - protein, 17 aa, Artificial Sequence
  Synthetically generated peptide
  VARIANT (1)..(17): Xaa = Any Amino Acid
CCXEFXCCNXPXACTGC

SEQ ID NO: 6388 - protein, 17 aa, Artificial Sequence
  Synthetically generated peptide
  VARIANT (1)..(17): Xaa = Any Amino Acid
CCXEFXCCNXPAXCTGC

SEQ ID NO: 6389 - protein, 17 aa, Artificial Sequence
  Synthetically generated peptide
  VARIANT (1)..(17): Xaa = Any Amino Acid
CCXEFXCCNXPACXTGC

SEQ ID NO: 6390 - protein, 17 aa, Artificial Sequence
  Synthetically generated peptide
  VARIANT (1)..(17): Xaa = Any Amino Acid
CCXEFXCCNXPACTXGC

SEQ ID NO: 6391 - protein, 17 aa, Artificial Sequence
  Synthetically generated peptide
  VARIANT (1)..(17): Xaa = Any Amino Acid
CCXEFXCCNXPACTGXC

SEQ ID NO: 6392 - protein, 16 aa, Artificial Sequence
  Synthetically generated peptide
  VARIANT (1)..(16): Xaa = Any Amino Acid
CCXEFXCCNPXACTGC

SEQ ID NO: 6393 - protein, 17 aa, Artificial Sequence
  Synthetically generated peptide
  VARIANT (1)..(17): Xaa = Any Amino Acid
CCXEFXCCNPXXACTGC

SEQ ID NO: 6394 - protein, 17 aa, Artificial Sequence
  Synthetically generated peptide
  VARIANT (1)..(17): Xaa = Any Amino Acid
CCXEFXCCNPXAXCTGC

SEQ ID NO: 6395 - protein, 17 aa, Artificial Sequence
  Synthetically generated peptide
  VARIANT (1)..(17): Xaa = Any Amino Acid
CCXEFXCCNPXACXTGC

SEQ ID NO: 6396 - protein, 17 aa, Artificial Sequence
  Synthetically generated peptide
  VARIANT (1)..(17): Xaa = Any Amino Acid
CCXEFXCCNPXACTXGC

SEQ ID NO: 6397 - protein, 17 aa, Artificial Sequence
  Synthetically generated peptide
  VARIANT (1)..(17): Xaa = Any Amino Acid
CCXEFXCCNPXACTGXC

SEQ ID NO: 6398 - protein, 16 aa, Artificial Sequence
  Synthetically generated peptide
  VARIANT (1)..(16): Xaa = Any Amino Acid
CCXEFXCCNPAXCTGC

SEQ ID NO: 6399 - protein, 17 aa, Artificial Sequence
  Synthetically generated peptide
  VARIANT (1)..(17): Xaa = Any Amino Acid
CCXEFXCCNPAXXCTGC

SEQ ID NO: 6400 - protein, 17 aa, Artificial Sequence
  Synthetically generated peptide
  VARIANT (1)..(17): Xaa = Any Amino Acid
CCXEFXCCNPAXCXTGC

SEQ ID NO: 6401 - protein, 17 aa, Artificial Sequence
  Synthetically generated peptide
  VARIANT (1)..(17): Xaa = Any Amino Acid
CCXEFXCCNPAXCTXGC

SEQ ID NO: 6402 - protein, 17 aa, Artificial Sequence
  Synthetically generated peptide
  VARIANT (1)..(17): Xaa = Any Amino Acid
CCXEFXCCNPAXCTGXC

SEQ ID NO: 6403 - protein, 16 aa, Artificial Sequence
  Synthetically generated peptide
  VARIANT (1)..(16): Xaa = Any Amino Acid
CCXEFXCCNPACXTGC

SEQ ID NO: 6404 - protein, 17 aa, Artificial Sequence
  Synthetically generated peptide
  VARIANT (1)..(17): Xaa = Any Amino Acid
CCXEFXCCNPACXXTGC

SEQ ID NO: 6405 - protein, 17 aa, Artificial Sequence
  Synthetically generated peptide
  VARIANT (1)..(17): Xaa = Any Amino Acid
CCXEFXCCNPACXTXGC

SEQ ID NO: 6406 - protein, 17 aa, Artificial Sequence
  Synthetically generated peptide
  VARIANT (1)..(17): Xaa = Any Amino Acid
CCXEFXCCNPACXTGXC

SEQ ID NO: 6407 - protein, 16 aa, Artificial Sequence
  Synthetically generated peptide
  VARIANT (1)..(16): Xaa = Any Amino Acid
CCXEFXCCNPACTXGC

SEQ ID NO: 6408 - protein, 17 aa, Artificial Sequence
  Synthetically generated peptide
  VARIANT (1)..(17): Xaa = Any Amino Acid
CCXEFXCCNPACTXXGC

SEQ ID NO: 6409 - protein, 17 aa, Artificial Sequence
  Synthetically generated peptide
  VARIANT (1)..(17): Xaa = Any Amino Acid
CCXEFXCCNPACTXGXC

SEQ ID NO: 6410 - protein, 16 aa, Artificial Sequence
  Synthetically generated peptide
  VARIANT (1)..(16): Xaa = Any Amino Acid
CCXEFXCCNPACTGXC

SEQ ID NO: 6411 - protein, 17 aa, Artificial Sequence
  Synthetically generated peptide
  VARIANT (1)..(17): Xaa = Any Amino Acid
CCXEFXCCNPACTGXXC

SEQ ID NO: 6412 - protein, 15 aa, Artificial Sequence
  Synthetically generated peptide
  VARIANT (1)..(15): Xaa = Any Amino Acid
CCXEFCCXNPACTGC

SEQ ID NO: 6413 - protein, 16 aa, Artificial Sequence
  Synthetically generated peptide
  VARIANT (1)..(16): Xaa = Any Amino Acid
CCXEFCCXXNPACTGC

SEQ ID NO: 6414 - protein, 17 aa, Artificial Sequence
  Synthetically generated peptide
  VARIANT (1)..(17): Xaa = Any Amino Acid
CCXEFCCXXXNPACTGC

SEQ ID NO: 6415 - protein, 17 aa, Artificial Sequence
  Synthetically generated peptide
  VARIANT (1)..(17): Xaa = Any Amino Acid
CCXEFCCXXNXPACTGC

SEQ ID NO: 6416 - protein, 17 aa, Artificial Sequence
  Synthetically generated peptide
  VARIANT (1)..(17): Xaa = Any Amino Acid
CCXEFCCXXNPXACTGC

SEQ ID NO: 6417 - protein, 17 aa, Artificial Sequence
  Synthetically generated peptide
  VARIANT (1)..(17): Xaa = Any Amino Acid
CCXEFCCXXNPAXCTGC

SEQ ID NO: 6418 - protein, 17 aa, Artificial Sequence
  Synthetically generated peptide
  VARIANT (1)..(17): Xaa = Any Amino Acid
CCXEFCCXXNPACXTGC

SEQ ID NO: 6419 - protein, 17 aa, Artificial Sequence
  Synthetically generated peptide
  VARIANT (1)..(17): Xaa = Any Amino Acid
CCXEFCCXXNPACTXGC

SEQ ID NO: 6420 - protein, 17 aa, Artificial Sequence
  Synthetically generated peptide
  VARIANT (1)..(17): Xaa = Any Amino Acid
CCXEFCCXXNPACTGXC

SEQ ID NO: 6421 - protein, 16 aa, Artificial Sequence
  Synthetically generated peptide
  VARIANT (1)..(16): Xaa = Any Amino Acid
CCXEFCCXNXPACTGC

SEQ ID NO: 6422 - protein, 17 aa, Artificial Sequence
  Synthetically generated peptide
  VARIANT (1)..(17): Xaa = Any Amino Acid
CCXEFCCXNXXPACTGC

SEQ ID NO: 6423 - protein, 17 aa, Artificial Sequence
  Synthetically generated peptide
  VARIANT (1)..(17): Xaa = Any Amino Acid
CCXEFCCXNXPXACTGC

SEQ ID NO: 6424 - protein, 17 aa, Artificial Sequence
  Synthetically generated peptide
  VARIANT (1)..(17): Xaa = Any Amino Acid
CCXEFCCXNXPAXCTGC

SEQ ID NO: 6425 - protein, 17 aa, Artificial Sequence
  Synthetically generated peptide
  VARIANT (1)..(17): Xaa = Any Amino Acid
CCXEFCCXNXPACXTGC

SEQ ID NO: 6426 - protein, 17 aa, Artificial Sequence
  Synthetically generated peptide
  VARIANT (1)..(17): Xaa = Any Amino Acid
CCXEFCCXNXPACTXGC

SEQ ID NO: 6427 - protein, 17 aa, Artificial Sequence
  Synthetically generated peptide
  VARIANT (1)..(17): Xaa = Any Amino Acid
CCXEFCCXNXPACTGXC

SEQ ID NO: 6428 - protein, 16 aa, Artificial Sequence
  Synthetically generated peptide
  VARIANT (1)..(16): Xaa = Any Amino Acid
CCXEFCCXNPXACTGC

SEQ ID NO: 6429 - protein, 17 aa, Artificial Sequence
  Synthetically generated peptide
  VARIANT (1)..(17): Xaa = Any Amino Acid
CCXEFCCXNPXXACTGC

SEQ ID NO: 6430 - protein, 17 aa, Artificial Sequence
  Synthetically generated peptide
  VARIANT (1)..(17): Xaa = Any Amino Acid
CCXEFCCXNPXAXCTGC

SEQ ID NO: 6431 - protein, 17 aa, Artificial Sequence
  Synthetically generated peptide
  VARIANT (1)..(17): Xaa = Any Amino Acid
CCXEFCCXNPXACXTGC

SEQ ID NO: 6432 - protein, 17 aa, Artificial Sequence
  Synthetically generated peptide
  VARIANT (1)..(17): Xaa = Any Amino Acid
CCXEFCCXNPXACTXGC

SEQ ID NO: 6433 - protein, 17 aa, Artificial Sequence
  Synthetically generated peptide
  VARIANT (1)..(17): Xaa = Any Amino Acid
CCXEFCCXNPXACTGXC

SEQ ID NO: 6434 - protein, 16 aa, Artificial Sequence
  Synthetically generated peptide
  VARIANT (1)..(16): Xaa = Any Amino Acid
CCXEFCCXNPAXCTGC

SEQ ID NO: 6435 - protein, 17 aa, Artificial Sequence
  Synthetically generated peptide
  VARIANT (1)..(17): Xaa = Any Amino Acid
CCXEFCCXNPAXXCTGC

SEQ ID NO: 6436 - protein, 17 aa, Artificial Sequence
  Synthetically generated peptide
  VARIANT (1)..(17): Xaa = Any Amino Acid
CCXEFCCXNPAXCXTGC

SEQ ID NO: 6437 - protein, 17 aa, Artificial Sequence
  Synthetically generated peptide
  VARIANT (1)..(17): Xaa = Any Amino Acid
CCXEFCCXNPAXCTXGC

SEQ ID NO: 6438 - protein, 17 aa, Artificial Sequence
  Synthetically generated peptide
  VARIANT (1)..(17): Xaa = Any Amino Acid
CCXEFCCXNPAXCTGXC

SEQ ID NO: 6439 - protein, 16 aa, Artificial Sequence
  Synthetically generated peptide
  VARIANT (1)..(16): Xaa = Any Amino Acid
CCXEFCCXNPACXTGC

SEQ ID NO: 6440 - protein, 17 aa, Artificial Sequence
  Synthetically generated peptide
  VARIANT (1)..(17): Xaa = Any Amino Acid
CCXEFCCXNPACXXTGC

SEQ ID NO: 6441 - protein, 17 aa, Artificial Sequence
  Synthetically generated peptide
  VARIANT (1)..(17): Xaa = Any Amino Acid
CCXEFCCXNPACXTXGC

SEQ ID NO: 6442 - protein, 17 aa, Artificial Sequence
  Synthetically generated peptide
  VARIANT (1)..(17): Xaa = Any Amino Acid
CCXEFCCXNPACXTGXC

SEQ ID NO: 6443 - protein, 16 aa, Artificial Sequence
  Synthetically generated peptide
  VARIANT (1)..(16): Xaa = Any Amino Acid
CCXEFCCXNPACTXGC

SEQ ID NO: 6444 - protein, 17 aa, Artificial Sequence
  Synthetically generated peptide
  VARIANT (1)..(17): Xaa = Any Amino Acid
CCXEFCCXNPACTXXGC

SEQ ID NO: 6445 - protein, 17 aa, Artificial Sequence
  Synthetically generated peptide
  VARIANT (1)..(17): Xaa = Any Amino Acid
CCXEFCCXNPACTXGXC

SEQ ID NO: 6446 - protein, 16 aa, Artificial Sequence
  Synthetically generated peptide
  VARIANT (1)..(16): Xaa = Any Amino Acid
CCXEFCCXNPACTGXC

SEQ ID NO: 6447 - protein, 17 aa, Artificial Sequence
  Synthetically generated peptide
  VARIANT (1)..(17): Xaa = Any Amino Acid
CCXEFCCXNPACTGXXC

SEQ ID NO: 6448 - protein, 15 aa, Artificial Sequence
  Synthetically generated peptide
  VARIANT (1)..(15): Xaa = Any Amino Acid
CCXEFCCNXPACTGC

SEQ ID NO: 6449 - protein, 16 aa, Artificial Sequence
  Synthetically generated peptide
  VARIANT (1)..(16): Xaa = Any Amino Acid
CCXEFCCNXXPACTGC

SEQ ID NO: 6450 - protein, 17 aa, Artificial Sequence
  Synthetically generated peptide
  VARIANT (1)..(17): Xaa = Any Amino Acid
CCXEFCCNXXXPACTGC

SEQ ID NO: 6451 - protein, 17 aa, Artificial Sequence
  Synthetically generated peptide
  VARIANT (1)..(17): Xaa = Any Amino Acid
CCXEFCCNXXPXACTGC

SEQ ID NO: 6452 - protein, 17 aa, Artificial Sequence
  Synthetically generated peptide
  VARIANT (1)..(17): Xaa = Any Amino Acid
CCXEFCCNXXPAXCTGC

SEQ ID NO: 6453 - protein, 17 aa, Artificial Sequence
  Synthetically generated peptide
  VARIANT (1)..(17): Xaa = Any Amino Acid
CCXEFCCNXXPACXTGC

SEQ ID NO: 6454 - protein, 17 aa, Artificial Sequence
  Synthetically generated peptide
  VARIANT (1)..(17): Xaa = Any Amino Acid
CCXEFCCNXXPACTXGC

SEQ ID NO: 6455 - protein, 17 aa, Artificial Sequence
  Synthetically generated peptide
  VARIANT (1)..(17): Xaa = Any Amino Acid
CCXEFCCNXXPACTGXC

SEQ ID NO: 6456 - protein, 16 aa, Artificial Sequence
  Synthetically generated peptide
  VARIANT (1)..(16): Xaa = Any Amino Acid
CCXEFCCNXPXACTGC

SEQ ID NO: 6457 - protein, 17 aa, Artificial Sequence
  Synthetically generated peptide
  VARIANT (1)..(17): Xaa = Any Amino Acid
CCXEFCCNXPXXACTGC

SEQ ID NO: 6458 - protein, 17 aa, Artificial Sequence
  Synthetically generated peptide
  VARIANT (1)..(17): Xaa = Any Amino Acid
CCXEFCCNXPXAXCTGC

SEQ ID NO: 6459 - protein, 17 aa, Artificial Sequence
  Synthetically generated peptide
  VARIANT (1)..(17): Xaa = Any Amino Acid
CCXEFCCNXPXACXTGC

SEQ ID NO: 6460 - protein, 17 aa, Artificial Sequence
  Synthetically generated peptide
  VARIANT (1)..(17): Xaa = Any Amino Acid
CCXEFCCNXPXACTXGC

SEQ ID NO: 6461 - protein, 17 aa, Artificial Sequence
  Synthetically generated peptide
  VARIANT (1)..(17): Xaa = Any Amino Acid
CCXEFCCNXPXACTGXC

SEQ ID NO: 6462 - protein, 16 aa, Artificial Sequence
  Synthetically generated peptide
  VARIANT (1)..(16): Xaa = Any Amino Acid
CCXEFCCNXPAXCTGC

SEQ ID NO: 6463 - protein, 17 aa, Artificial Sequence
  Synthetically generated peptide
  VARIANT (1)..(17): Xaa = Any Amino Acid
CCXEFCCNXPAXXCTGC

SEQ ID NO: 6464 - protein, 17 aa, Artificial Sequence
  Synthetically generated peptide
  VARIANT (1)..(17): Xaa = Any Amino Acid
CCXEFCCNXPAXCXTGC

SEQ ID NO: 6465 - protein, 17 aa, Artificial Sequence
  Synthetically generated peptide
  VARIANT (1)..(17): Xaa = Any Amino Acid
CCXEFCCNXPAXCTXGC

SEQ ID NO: 6466 - protein, 17 aa, Artificial Sequence
  Synthetically generated peptide
  VARIANT (1)..(17): Xaa = Any Amino Acid
CCXEFCCNXPAXCTGXC

SEQ ID NO: 6467 - protein, 16 aa, Artificial Sequence
  Synthetically generated peptide
  VARIANT (1)..(16): Xaa = Any Amino Acid
CCXEFCCNXPACXTGC

SEQ ID NO: 6468 - protein, 17 aa, Artificial Sequence
  Synthetically generated peptide
  VARIANT (1)..(17): Xaa = Any Amino Acid
CCXEFCCNXPACXXTGC

SEQ ID NO: 6469 - protein, 17 aa, Artificial Sequence
  Synthetically generated peptide
  VARIANT (1)..(17): Xaa = Any Amino Acid
CCXEFCCNXPACXTXGC

SEQ ID NO: 6470 - protein, 17 aa, Artificial Sequence
  Synthetically generated peptide
  VARIANT (1)..(17): Xaa = Any Amino Acid
CCXEFCCNXPACXTGXC

SEQ ID NO: 6471 - protein, 16 aa, Artificial Sequence
  Synthetically generated peptide
  VARIANT (1)..(16): Xaa = Any Amino Acid
CCXEFCCNXPACTXGC

SEQ ID NO: 6472 - protein, 17 aa, Artificial Sequence
  Synthetically generated peptide
  VARIANT (1)..(17): Xaa = Any Amino Acid
CCXEFCCNXPACTXXGC

SEQ ID NO: 6473 - protein, 17 aa, Artificial Sequence
  Synthetically generated peptide
  VARIANT (1)..(17): Xaa = Any Amino Acid
CCXEFCCNXPACTXGXC

SEQ ID NO: 6474 - protein, 16 aa, Artificial Sequence
  Synthetically generated peptide
  VARIANT (1)..(16): Xaa = Any Amino Acid
CCXEFCCNXPACTGXC

SEQ ID NO: 6475 - protein, 17 aa, Artificial Sequence
  Synthetically generated peptide
  VARIANT (1)..(17): Xaa = Any Amino Acid
CCXEFCCNXPACTGXXC

SEQ ID NO: 6476 - protein, 15 aa, Artificial Sequence
  Synthetically generated peptide
  VARIANT (1)..(15): Xaa = Any Amino Acid
CCXEFCCNPXACTGC

SEQ ID NO: 6477 - protein, 16 aa, Artificial Sequence
  Synthetically generated peptide
  VARIANT (1)..(16): Xaa = Any Amino Acid
CCXEFCCNPXXACTGC

SEQ ID NO: 6478 - protein, 17 aa, Artificial Sequence
  Synthetically generated peptide
  VARIANT (1)..(17): Xaa = Any Amino Acid
CCXEFCCNPXXXACTGC

SEQ ID NO: 6479 - protein, 17 aa, Artificial Sequence
  Synthetically generated peptide
  VARIANT (1)..(17): Xaa = Any Amino Acid
CCXEFCCNPXXAXCTGC

SEQ ID NO: 6480 - protein, 17 aa, Artificial Sequence
  Synthetically generated peptide
  VARIANT (1)..(17): Xaa = Any Amino Acid
CCXEFCCNPXXACXTGC

SEQ ID NO: 6481 - protein, 17 aa, Artificial Sequence
  Synthetically generated peptide
  VARIANT (1)..(17): Xaa = Any Amino Acid
CCXEFCCNPXXACTXGC

SEQ ID NO: 6482 - protein, 17 aa, Artificial Sequence
  Synthetically generated peptide
  VARIANT (1)..(17): Xaa = Any Amino Acid
CCXEFCCNPXXACTGXC

SEQ ID NO: 6483 - protein, 16 aa, Artificial Sequence
  Synthetically generated peptide
  VARIANT (1)..(16): Xaa = Any Amino Acid
CCXEFCCNPXAXCTGC

SEQ ID NO: 6484 - protein, 17 aa, Artificial Sequence
  Synthetically generated peptide
  VARIANT (1)..(17): Xaa = Any Amino Acid
CCXEFCCNPXAXXCTGC

SEQ ID NO: 6485 - protein, 17 aa, Artificial Sequence
  Synthetically generated peptide
  VARIANT (1)..(17): Xaa = Any Amino Acid
CCXEFCCNPXAXCXTGC

SEQ ID NO: 6486 - protein, 17 aa, Artificial Sequence
  Synthetically generated peptide
  VARIANT (1)..(17): Xaa = Any Amino Acid
CCXEFCCNPXAXCTXGC

SEQ ID NO: 6487 - protein, 17 aa, Artificial Sequence
  Synthetically generated peptide
  VARIANT (1)..(17): Xaa = Any Amino Acid
CCXEFCCNPXAXCTGXC

SEQ ID NO: 6488 - protein, 16 aa, Artificial Sequence
  Synthetically generated peptide
  VARIANT (1)..(16): Xaa = Any Amino Acid
CCXEFCCNPXACXTGC

SEQ ID NO: 6489 - protein, 17 aa, Artificial Sequence
  Synthetically generated peptide
  VARIANT (1)..(17): Xaa = Any Amino Acid
CCXEFCCNPXACXXTGC

SEQ ID NO: 6490 - protein, 17 aa, Artificial Sequence
  Synthetically generated peptide
  VARIANT (1)..(17): Xaa = Any Amino Acid
CCXEFCCNPXACXTXGC

SEQ ID NO: 6491 - protein, 17 aa, Artificial Sequence
  Synthetically generated peptide
  VARIANT (1)..(17): Xaa = Any Amino Acid
CCXEFCCNPXACXTGXC

SEQ ID NO: 6492 - protein, 16 aa, Artificial Sequence
  Synthetically generated peptide
  VARIANT (1)..(16): Xaa = Any Amino Acid
CCXEFCCNPXACTXGC

SEQ ID NO: 6493 - protein, 17 aa, Artificial Sequence
  Synthetically generated peptide
  VARIANT (1)..(17): Xaa = Any Amino Acid
CCXEFCCNPXACTXXGC

SEQ ID NO: 6494 - protein, 17 aa, Artificial Sequence
  Synthetically generated peptide
  VARIANT (1)..(17): Xaa = Any Amino Acid
CCXEFCCNPXACTXGXC

SEQ ID NO: 6495 - protein, 16 aa, Artificial Sequence
  Synthetically generated peptide
  VARIANT (1)..(16): Xaa = Any Amino Acid
CCXEFCCNPXACTGXC

SEQ ID NO: 6496 - protein, 17 aa, Artificial Sequence
  Synthetically generated peptide
  VARIANT (1)..(17): Xaa = Any Amino Acid
CCXEFCCNPXACTGXXC

SEQ ID NO: 6497 - protein, 15 aa, Artificial Sequence
  Synthetically generated peptide
  VARIANT (1)..(15): Xaa = Any Amino Acid
CCXEFCCNPAXCTGC

SEQ ID NO: 6498 - protein, 16 aa, Artificial Sequence
  Synthetically generated peptide
  VARIANT (1)..(16): Xaa = Any Amino Acid
CCXEFCCNPAXXCTGC

SEQ ID NO: 6499 - protein, 17 aa, Artificial Sequence
  Synthetically generated peptide
  VARIANT (1)..(17): Xaa = Any Amino Acid
CCXEFCCNPAXXXCTGC

SEQ ID NO: 6500 - protein, 17 aa, Artificial Sequence
  Synthetically generated peptide
  VARIANT (1)..(17): Xaa = Any Amino Acid
CCXEFCCNPAXXCXTGC

SEQ ID NO: 6501 - protein, 17 aa, Artificial Sequence
  Synthetically generated peptide
  VARIANT (1)..(17): Xaa = Any Amino Acid
CCXEFCCNPAXXCTXGC

SEQ ID NO: 6502 - protein, 17 aa, Artificial Sequence
  Synthetically generated peptide
  VARIANT (1)..(17): Xaa = Any Amino Acid
CCXEFCCNPAXXCTGXC

SEQ ID NO: 6503 - protein, 16 aa, Artificial Sequence
  Synthetically generated peptide
  VARIANT (1)..(16): Xaa = Any Amino Acid
CCXEFCCNPAXCXTGC

SEQ ID NO: 6504 - protein, 17 aa, Artificial Sequence
  Synthetically generated peptide
  VARIANT (1)..(17): Xaa = Any Amino Acid
CCXEFCCNPAXCXXTGC

SEQ ID NO: 6505 - protein, 17 aa, Artificial Sequence
  Synthetically generated peptide
  VARIANT (1)..(17): Xaa = Any Amino Acid
CCXEFCCNPAXCXTXGC

SEQ ID NO: 6506 - protein, 17 aa, Artificial Sequence
  Synthetically generated peptide
  VARIANT (1)..(17): Xaa = Any Amino Acid
CCXEFCCNPAXCXTGXC

SEQ ID NO: 6507 - protein, 16 aa, Artificial Sequence
  Synthetically generated peptide
  VARIANT (1)..(16): Xaa = Any Amino Acid
CCXEFCCNPAXCTXGC

SEQ ID NO: 6508 - protein, 17 aa, Artificial Sequence
  Synthetically generated peptide
  VARIANT (1)..(17): Xaa = Any Amino Acid
CCXEFCCNPAXCTXXGC

SEQ ID NO: 6509 - protein, 17 aa, Artificial Sequence
  Synthetically generated peptide
  VARIANT (1)..(17): Xaa = Any Amino Acid
CCXEFCCNPAXCTXGXC

SEQ ID NO: 6510 - protein, 16 aa, Artificial Sequence
  Synthetically generated peptide
  VARIANT (1)..(16): Xaa = Any Amino Acid
CCXEFCCNPAXCTGXC

SEQ ID NO: 6511 - protein, 17 aa, Artificial Sequence
  Synthetically generated peptide
  VARIANT (1)..(17): Xaa = Any Amino Acid
CCXEFCCNPAXCTGXXC

SEQ ID NO: 6512 - protein, 15 aa, Artificial Sequence
  Synthetically generated peptide
  VARIANT (1)..(15): Xaa = Any Amino Acid
CCXEFCCNPACXTGC

SEQ ID NO: 6513 - protein, 16 aa, Artificial Sequence
  Synthetically generated peptide
  VARIANT (1)..(16): Xaa = Any Amino Acid
CCXEFCCNPACXXTGC

SEQ ID NO: 6514 - protein, 17 aa, Artificial Sequence
  Synthetically generated peptide
  VARIANT (1)..(17): Xaa = Any Amino Acid
CCXEFCCNPACXXXTGC

SEQ ID NO: 6515 - protein, 17 aa, Artificial Sequence
  Synthetically generated peptide
  VARIANT (1)..(17): Xaa = Any Amino Acid
CCXEFCCNPACXXTXGC

SEQ ID NO: 6516 - protein, 17 aa, Artificial Sequence
  Synthetically generated peptide
  VARIANT (1)..(17): Xaa = Any Amino Acid
CCXEFCCNPACXXTGXC

SEQ ID NO: 6517 - protein, 16 aa, Artificial Sequence
  Synthetically generated peptide
  VARIANT (1)..(16): Xaa = Any Amino Acid
CCXEFCCNPACXTXGC

SEQ ID NO: 6518 - protein, 17 aa, Artificial Sequence
  Synthetically generated peptide
  VARIANT (1)..(17): Xaa = Any Amino Acid
CCXEFCCNPACXTXXGC

SEQ ID NO: 6519 - protein, 17 aa, Artificial Sequence
  Synthetically generated peptide
  VARIANT (1)..(17): Xaa = Any Amino Acid
CCXEFCCNPACXTXGXC

SEQ ID NO: 6520 - protein, 16 aa, Artificial Sequence
  Synthetically generated peptide
  VARIANT (1)..(16): Xaa = Any Amino Acid
CCXEFCCNPACXTGXC

SEQ ID NO: 6521 - protein, 17 aa, Artificial Sequence
  Synthetically generated peptide
  VARIANT (1)..(17): Xaa = Any Amino Acid
CCXEFCCNPACXTGXXC

SEQ ID NO: 6522 - protein, 15 aa, Artificial Sequence
  Synthetically generated peptide
  VARIANT (1)..(15): Xaa = Any Amino Acid
CCXEFCCNPACTXGC

SEQ ID NO: 6523 - protein, 16 aa, Artificial Sequence
  Synthetically generated peptide
  VARIANT (1)..(16): Xaa = Any Amino Acid
CCXEFCCNPACTXXGC

SEQ ID NO: 6524 - protein, 17 aa, Artificial Sequence
  Synthetically generated peptide
  VARIANT (1)..(17): Xaa = Any Amino Acid
CCXEFCCNPACTXXXGC

SEQ ID NO: 6525 - protein, 17 aa, Artificial Sequence
  Synthetically generated peptide
  VARIANT (1)..(17): Xaa = Any Amino Acid
CCXEFCCNPACTXXGXC

SEQ ID NO: 6526 - protein, 16 aa, Artificial Sequence
  Synthetically generated peptide
  VARIANT (1)..(16): Xaa = Any Amino Acid
CCXEFCCNPACTXGXC

SEQ ID NO: 6527 - protein, 17 aa, Artificial Sequence
  Synthetically generated peptide
  VARIANT (1)..(17): Xaa = Any Amino Acid
CCXEFCCNPACTXGXXC

SEQ ID NO: 6528 - protein, 15 aa, Artificial Sequence
  Synthetically generated peptide
  VARIANT (1)..(15): Xaa = Any Amino Acid
CCXEFCCNPACTGXC

SEQ ID NO: 6529 - protein, 16 aa, Artificial Sequence
  Synthetically generated peptide
  VARIANT (1)..(16): Xaa = Any Amino Acid
CCXEFCCNPACTGXXC

SEQ ID NO: 6530 - protein, 17 aa, Artificial Sequence
  Synthetically generated peptide
  VARIANT (1)..(17): Xaa = Any Amino Acid
CCXEFCCNPACTGXXXC

SEQ ID NO: 6531 - protein, 14 aa, Artificial Sequence
  Synthetically generated peptide
  VARIANT (1)..(14): Xaa = Any Amino Acid
CCEXFCCNPACTGC

SEQ ID NO: 6532 - protein, 15 aa, Artificial Sequence
  Synthetically generated peptide
  VARIANT (1)..(15): Xaa = Any Amino Acid
CCEXXFCCNPACTGC

SEQ ID NO: 6533 - protein, 16 aa, Artificial Sequence
  Synthetically generated peptide
  VARIANT (1)..(16): Xaa = Any Amino Acid
CCEXXXFCCNPACTGC

SEQ ID NO: 6534 - protein, 17 aa, Artificial Sequence
  Synthetically generated peptide
  VARIANT (1)..(17): Xaa = Any Amino Acid
CCEXXXXFCCNPACTGC

SEQ ID NO: 6535 - protein, 17 aa, Artificial Sequence
  Synthetically generated peptide
  VARIANT (1)..(17): Xaa = Any Amino Acid
CCEXXXFXCCNPACTGC

SEQ ID NO: 6536 - protein, 17 aa, Artificial Sequence
  Synthetically generated peptide
  VARIANT (1)..(17): Xaa = Any Amino Acid
CCEXXXFCCXNPACTGC

SEQ ID NO: 6537 - protein, 17 aa, Artificial Sequence
  Synthetically generated peptide
  VARIANT (1)..(17): Xaa = Any Amino Acid
CCEXXXFCCNXPACTGC

SEQ ID NO: 6538 - protein, 17 aa, Artificial Sequence
  Synthetically generated peptide
  VARIANT (1)..(17): Xaa = Any Amino Acid
CCEXXXFCCNPXACTGC

SEQ ID NO: 6539 - protein, 17 aa, Artificial Sequence
  Synthetically generated peptide
  VARIANT (1)..(17): Xaa = Any Amino Acid
CCEXXXFCCNPAXCTGC

SEQ ID NO: 6540 - protein, 17 aa, Artificial Sequence
  Synthetically generated peptide
  VARIANT (1)..(17): Xaa = Any Amino Acid
CCEXXXFCCNPACXTGC

SEQ ID NO: 6541 - protein, 17 aa, Artificial Sequence
  Synthetically generated peptide
  VARIANT (1)..(17): Xaa = Any Amino Acid
CCEXXXFCCNPACTXGC

SEQ ID NO: 6542 - protein, 17 aa, Artificial Sequence
  Synthetically generated peptide
  VARIANT (1)..(17): Xaa = Any Amino Acid
CCEXXXFCCNPACTGXC

SEQ ID NO: 6543 - protein, 16 aa, Artificial Sequence
  Synthetically generated peptide
  VARIANT (1)..(16): Xaa = Any Amino Acid
CCEXXFXCCNPACTGC

SEQ ID NO: 6544 - protein, 17 aa, Artificial Sequence
  Synthetically generated peptide
  VARIANT (1)..(17): Xaa = Any Amino Acid
CCEXXFXXCCNPACTGC

SEQ ID NO: 6545 - protein, 17 aa, Artificial Sequence
  Synthetically generated peptide
  VARIANT (1)..(17): Xaa = Any Amino Acid
CCEXXFXCCXNPACTGC

SEQ ID NO: 6546 - protein, 17 aa, Artificial Sequence
  Synthetically generated peptide
  VARIANT (1)..(17): Xaa = Any Amino Acid
CCEXXFXCCNXPACTGC

SEQ ID NO: 6547 - protein, 17 aa, Artificial Sequence
  Synthetically generated peptide
  VARIANT (1)..(17): Xaa = Any Amino Acid
CCEXXFXCCNPXACTGC

SEQ ID NO: 6548 - protein, 17 aa, Artificial Sequence
  Synthetically generated peptide
  VARIANT (1)..(17): Xaa = Any Amino Acid
CCEXXFXCCNPAXCTGC

SEQ ID NO: 6549 - protein, 17 aa, Artificial Sequence
  Synthetically generated peptide
  VARIANT (1)..(17): Xaa = Any Amino Acid
CCEXXFXCCNPACXTGC

SEQ ID NO: 6550 - protein, 17 aa, Artificial Sequence
  Synthetically generated peptide
  VARIANT (1)..(17): Xaa = Any Amino Acid
CCEXXFXCCNPACTXGC

SEQ ID NO: 6551 - protein, 17 aa, Artificial Sequence
  Synthetically generated peptide
  VARIANT (1)..(17): Xaa = Any Amino Acid
CCEXXFXCCNPACTGXC

SEQ ID NO: 6552 - protein, 16 aa, Artificial Sequence
  Synthetically generated peptide
  VARIANT (1)..(16): Xaa = Any Amino Acid
CCEXXFCCXNPACTGC

SEQ ID NO: 6553 - protein, 17 aa, Artificial Sequence
  Synthetically generated peptide
  VARIANT (1)..(17): Xaa = Any Amino Acid
CCEXXFCCXXNPACTGC

SEQ ID NO: 6554 - protein, 17 aa, Artificial Sequence
  Synthetically generated peptide
  VARIANT (1)..(17): Xaa = Any Amino Acid
CCEXXFCCXNXPACTGC

SEQ ID NO: 6555 - protein, 17 aa, Artificial Sequence
  Synthetically generated peptide
  VARIANT (1)..(17): Xaa = Any Amino Acid
CCEXXFCCXNPXACTGC

SEQ ID NO: 6556 - protein, 17 aa, Artificial Sequence
  Synthetically generated peptide
  VARIANT (1)..(17): Xaa = Any Amino Acid
CCEXXFCCXNPAXCTGC

SEQ ID NO: 6557 - protein, 17 aa, Artificial Sequence
  Synthetically generated peptide
  VARIANT (1)..(17): Xaa = Any Amino Acid
CCEXXFCCXNPACXTGC

SEQ ID NO: 6558 - protein, 17 aa, Artificial Sequence
  Synthetically generated peptide
  VARIANT (1)..(17): Xaa = Any Amino Acid
CCEXXFCCXNPACTXGC

SEQ ID NO: 6559 - protein, 17 aa, Artificial Sequence
  Synthetically generated peptide
  VARIANT (1)..(17): Xaa = Any Amino Acid
CCEXXFCCXNPACTGXC

SEQ ID NO: 6560 - protein, 16 aa, Artificial Sequence
  Synthetically generated peptide
  VARIANT (1)..(16): Xaa = Any Amino Acid
CCEXXFCCNXPACTGC

SEQ ID NO: 6561 - protein, 17 aa, Artificial Sequence
  Synthetically generated peptide
  VARIANT (1)..(17): Xaa = Any Amino Acid
CCEXXFCCNXXPACTGC

SEQ ID NO: 6562 - protein, 17 aa, Artificial Sequence
  Synthetically generated peptide
  VARIANT (1)..(17): Xaa = Any Amino Acid
CCEXXFCCNXPXACTGC

SEQ ID NO: 6563 - protein, 17 aa, Artificial Sequence
  Synthetically generated peptide
  VARIANT (1)..(17): Xaa = Any Amino Acid
CCEXXFCCNXPAXCTGC

SEQ ID NO: 6564 - protein, 17 aa, Artificial Sequence
  Synthetically generated peptide
  VARIANT (1)..(17): Xaa = Any Amino Acid
CCEXXFCCNXPACXTGC

SEQ ID NO: 6565 - protein, 17 aa, Artificial Sequence
  Synthetically generated peptide
  VARIANT (1)..(17): Xaa = Any Amino Acid
CCEXXFCCNXPACTXGC

SEQ ID NO: 6566 - protein, 17 aa, Artificial Sequence
  Synthetically generated peptide
  VARIANT (1)..(17): Xaa = Any Amino Acid
CCEXXFCCNXPACTGXC

SEQ ID NO: 6567 - protein, 16 aa, Artificial Sequence
  Synthetically generated peptide
  VARIANT (1)..(16): Xaa = Any Amino Acid
CCEXXFCCNPXACTGC

SEQ ID NO: 6568 - protein, 17 aa, Artificial Sequence
  Synthetically generated peptide
  VARIANT (1)..(17): Xaa = Any Amino Acid
CCEXXFCCNPXXACTGC

SEQ ID NO: 6569 - protein, 17 aa, Artificial Sequence
  Synthetically generated peptide
  VARIANT (1)..(17): Xaa = Any Amino Acid
CCEXXFCCNPXAXCTGC

SEQ ID NO: 6570 - protein, 17 aa, Artificial Sequence
  Synthetically generated peptide
  VARIANT (1)..(17): Xaa = Any Amino Acid
CCEXXFCCNPXACXTGC

SEQ ID NO: 6571 - protein, 17 aa, Artificial Sequence
  Synthetically generated peptide
  VARIANT (1)..(17): Xaa = Any Amino Acid
CCEXXFCCNPXACTXGC

SEQ ID NO: 6572 - protein, 17 aa, Artificial Sequence
  Synthetically generated peptide
  VARIANT (1)..(17): Xaa = Any Amino Acid
CCEXXFCCNPXACTGXC

SEQ ID NO: 6573 - protein, 16 aa, Artificial Sequence
  Synthetically generated peptide
  VARIANT (1)..(16): Xaa = Any Amino Acid
CCEXXFCCNPAXCTGC

SEQ ID NO: 6574 - protein, 17 aa, Artificial Sequence
  Synthetically generated peptide
  VARIANT (1)..(17): Xaa = Any Amino Acid
CCEXXFCCNPAXXCTGC

SEQ ID NO: 6575 - protein, 17 aa, Artificial Sequence
  Synthetically generated peptide
  VARIANT (1)..(17): Xaa = Any Amino Acid
CCEXXFCCNPAXCXTGC

SEQ ID NO: 6576 - protein, 17 aa, Artificial Sequence
  Synthetically generated peptide
  VARIANT (1)..(17): Xaa = Any Amino Acid
CCEXXFCCNPAXCTXGC

SEQ ID NO: 6577 - protein, 17 aa, Artificial Sequence
  Synthetically generated peptide
  VARIANT (1)..(17): Xaa = Any Amino Acid
CCEXXFCCNPAXCTGXC

SEQ ID NO: 6578 - protein, 16 aa, Artificial Sequence
  Synthetically generated peptide
  VARIANT (1)..(16): Xaa = Any Amino Acid
CCEXXFCCNPACXTGC

SEQ ID NO: 6579 - protein, 17 aa, Artificial Sequence
  Synthetically generated peptide
  VARIANT (1)..(17): Xaa = Any Amino Acid
CCEXXFCCNPACXXTGC

SEQ ID NO: 6580 - protein, 17 aa, Artificial Sequence
  Synthetically generated peptide
  VARIANT (1)..(17): Xaa = Any Amino Acid
CCEXXFCCNPACXTXGC

SEQ ID NO: 6581 - protein, 17 aa, Artificial Sequence
  Synthetically generated peptide
  VARIANT (1)..(17): Xaa = Any Amino Acid
CCEXXFCCNPACXTGXC

SEQ ID NO: 6582 - protein, 16 aa, Artificial Sequence
  Synthetically generated peptide
  VARIANT (1)..(16): Xaa = Any Amino Acid
CCEXXFCCNPACTXGC

SEQ ID NO: 6583 - protein, 17 aa, Artificial Sequence
  Synthetically generated peptide
  VARIANT (1)..(17): Xaa = Any Amino Acid
CCEXXFCCNPACTXXGC

SEQ ID NO: 6584 - protein, 17 aa, Artificial Sequence
  Synthetically generated peptide
  VARIANT (1)..(17): Xaa = Any Amino Acid
CCEXXFCCNPACTXGXC

SEQ ID NO: 6585 - protein, 16 aa, Artificial Sequence
  Synthetically generated peptide
  VARIANT (1)..(16): Xaa = Any Amino Acid
CCEXXFCCNPACTGXC

SEQ ID NO: 6586 - protein, 17 aa, Artificial Sequence
  Synthetically generated peptide
  VARIANT (1)..(17): Xaa = Any Amino Acid
CCEXXFCCNPACTGXXC

SEQ ID NO: 6587 - protein, 15 aa, Artificial Sequence
  Synthetically generated peptide
  VARIANT (1)..(15): Xaa = Any Amino Acid
CCEXFXCCNPACTGC

SEQ ID NO: 6588 - protein, 16 aa, Artificial Sequence
  Synthetically generated peptide
  VARIANT (1)..(16): Xaa = Any Amino Acid
CCEXFXXCCNPACTGC

SEQ ID NO: 6589 - protein, 17 aa, Artificial Sequence
  Synthetically generated peptide
  VARIANT (1)..(17): Xaa = Any Amino Acid
CCEXFXXXCCNPACTGC

SEQ ID NO: 6590 - protein, 17 aa, Artificial Sequence
  Synthetically generated peptide
  VARIANT (1)..(17): Xaa = Any Amino Acid
CCEXFXXCCXNPACTGC

SEQ ID NO: 6591 - protein, 17 aa, Artificial Sequence
  Synthetically generated peptide
  VARIANT (1)..(17): Xaa = Any Amino Acid
CCEXFXXCCNXPACTGC

SEQ ID NO: 6592 - protein, 17 aa, Artificial Sequence
  Synthetically generated peptide
  VARIANT (1)..(17): Xaa = Any Amino Acid
CCEXFXXCCNPXACTGC

SEQ ID NO: 6593 - protein, 17 aa, Artificial Sequence
  Synthetically generated peptide
  VARIANT (1)..(17): Xaa = Any Amino Acid
CCEXFXXCCNPAXCTGC

SEQ ID NO: 6594 - protein, 17 aa, Artificial Sequence
  Synthetically generated peptide
  VARIANT (1)..(17): Xaa = Any Amino Acid
CCEXFXXCCNPACXTGC

SEQ ID NO: 6595 - protein, 17 aa, Artificial Sequence
  Synthetically generated peptide
  VARIANT (1)..(17): Xaa = Any Amino Acid
CCEXFXXCCNPACTXGC

SEQ ID NO: 6596 - protein, 17 aa, Artificial Sequence
  Synthetically generated peptide
  VARIANT (1)..(17): Xaa = Any Amino Acid
CCEXFXXCCNPACTGXC

SEQ ID NO: 6597 - protein, 16 aa, Artificial Sequence
  Synthetically generated peptide
  VARIANT (1)..(16): Xaa = Any Amino Acid
CCEXFXCCXNPACTGC

SEQ ID NO: 6598 - protein, 17 aa, Artificial Sequence
  Synthetically generated peptide
  VARIANT (1)..(17): Xaa = Any Amino Acid
CCEXFXCCXXNPACTGC

SEQ ID NO: 6599 - protein, 17 aa, Artificial Sequence
  Synthetically generated peptide
  VARIANT (1)..(17): Xaa = Any Amino Acid
CCEXFXCCXNXPACTGC

SEQ ID NO: 6600 - protein, 17 aa, Artificial Sequence
  Synthetically generated peptide
  VARIANT (1)..(17): Xaa = Any Amino Acid
CCEXFXCCXNPXACTGC

SEQ ID NO: 6601 - protein, 17 aa, Artificial Sequence
  Synthetically generated peptide
  VARIANT (1)..(17): Xaa = Any Amino Acid
CCEXFXCCXNPAXCTGC

SEQ ID NO: 6602 - protein, 17 aa, Artificial Sequence
  Synthetically generated peptide
  VARIANT (1)..(17): Xaa = Any Amino Acid
CCEXFXCCXNPACXTGC

SEQ ID NO: 6603 - protein, 17 aa, Artificial Sequence
  Synthetically generated peptide
  VARIANT (1)..(17): Xaa = Any Amino Acid
CCEXFXCCXNPACTXGC

SEQ ID NO: 6604 - protein, 17 aa, Artificial Sequence
  Synthetically generated peptide
  VARIANT (1)..(17): Xaa = Any Amino Acid
CCEXFXCCXNPACTGXC

SEQ ID NO: 6605 - protein, 16 aa, Artificial Sequence
  Synthetically generated peptide
  VARIANT (1)..(16): Xaa = Any Amino Acid
CCEXFXCCNXPACTGC

SEQ ID NO: 6606 - protein, 17 aa, Artificial Sequence
  Synthetically generated peptide
  VARIANT (1)..(17): Xaa = Any Amino Acid
CCEXFXCCNXXPACTGC

SEQ ID NO: 6607 - protein, 17 aa, Artificial Sequence
  Synthetically generated peptide
  VARIANT (1)..(17): Xaa = Any Amino Acid
CCEXFXCCNXPXACTGC

SEQ ID NO: 6608 - protein, 17 aa, Artificial Sequence
  Synthetically generated peptide
  VARIANT (1)..(17): Xaa = Any Amino Acid
CCEXFXCCNXPAXCTGC

SEQ ID NO: 6609 - protein, 17 aa, Artificial Sequence
  Synthetically generated peptide
  VARIANT (1)..(17): Xaa = Any Amino Acid
CCEXFXCCNXPACXTGC

SEQ ID NO: 6610 - protein, 17 aa, Artificial Sequence
  Synthetically generated peptide
  VARIANT (1)..(17): Xaa = Any Amino Acid
CCEXFXCCNXPACTXGC

SEQ ID NO: 6611 - protein, 17 aa, Artificial Sequence
  Synthetically generated peptide
  VARIANT (1)..(17): Xaa = Any Amino Acid
CCEXFXCCNXPACTGXC

SEQ ID NO: 6612 - protein, 16 aa, Artificial Sequence
  Synthetically generated peptide
  VARIANT (1)..(16): Xaa = Any Amino Acid
CCEXFXCCNPXACTGC

SEQ ID NO: 6613 - protein, 17 aa, Artificial Sequence
  Synthetically generated peptide
  VARIANT (1)..(17): Xaa = Any Amino Acid
CCEXFXCCNPXXACTGC

SEQ ID NO: 6614 - protein, 17 aa, Artificial Sequence
  Synthetically generated peptide
  VARIANT (1)..(17): Xaa = Any Amino Acid
CCEXFXCCNPXAXCTGC

SEQ ID NO: 6615 - protein, 17 aa, Artificial Sequence
  Synthetically generated peptide
  VARIANT (1)..(17): Xaa = Any Amino Acid
CCEXFXCCNPXACXTGC

SEQ ID NO: 6616 - protein, 17 aa, Artificial Sequence
  Synthetically generated peptide
  VARIANT (1)..(17): Xaa = Any Amino Acid
CCEXFXCCNPXACTXGC

SEQ ID NO: 6617 - protein, 17 aa, Artificial Sequence
  Synthetically generated peptide
  VARIANT (1)..(17): Xaa = Any Amino Acid
CCEXFXCCNPXACTGXC

SEQ ID NO: 6618 - protein, 16 aa, Artificial Sequence
  Synthetically generated peptide
  VARIANT (1)..(16): Xaa = Any Amino Acid
CCEXFXCCNPAXCTGC

SEQ ID NO: 6619 - protein, 17 aa, Artificial Sequence
  Synthetically generated peptide
  VARIANT (1)..(17): Xaa = Any Amino Acid
CCEXFXCCNPAXXCTGC

SEQ ID NO: 6620 - protein, 17 aa, Artificial Sequence
  Synthetically generated peptide
  VARIANT (1)..(17): Xaa = Any Amino Acid
CCEXFXCCNPAXCXTGC

SEQ ID NO: 6621 - protein, 17 aa, Artificial Sequence
  Synthetically generated peptide
  VARIANT (1)..(17): Xaa = Any Amino Acid
CCEXFXCCNPAXCTXGC

SEQ ID NO: 6622 - protein, 17 aa, Artificial Sequence
  Synthetically generated peptide
  VARIANT (1)..(17): Xaa = Any Amino Acid
CCEXFXCCNPAXCTGXC

SEQ ID NO: 6623 - protein, 16 aa, Artificial Sequence
  Synthetically generated peptide
  VARIANT (1)..(16): Xaa = Any Amino Acid
CCEXFXCCNPACXTGC

SEQ ID NO: 6624 - protein, 17 aa, Artificial Sequence
  Synthetically generated peptide
  VARIANT (1)..(17): Xaa = Any Amino Acid
CCEXFXCCNPACXXTGC

SEQ ID NO: 6625 - protein, 17 aa, Artificial Sequence
  Synthetically generated peptide
  VARIANT (1)..(17): Xaa = Any Amino Acid
CCEXFXCCNPACXTXGC

SEQ ID NO: 6626 - protein, 17 aa, Artificial Sequence
  Synthetically generated peptide
  VARIANT (1)..(17): Xaa = Any Amino Acid
CCEXFXCCNPACXTGXC

SEQ ID NO: 6627 - protein, 16 aa, Artificial Sequence
  Synthetically generated peptide
  VARIANT (1)..(16): Xaa = Any Amino Acid
CCEXFXCCNPACTXGC

SEQ ID NO: 6628 - protein, 17 aa, Artificial Sequence
  Synthetically generated peptide
  VARIANT (1)..(17): Xaa = Any Amino Acid
CCEXFXCCNPACTXXGC

SEQ ID NO: 6629 - protein, 17 aa, Artificial Sequence
  Synthetically generated peptide
  VARIANT (1)..(17): Xaa = Any Amino Acid
CCEXFXCCNPACTXGXC

SEQ ID NO: 6630 - protein, 16 aa, Artificial Sequence
  Synthetically generated peptide
  VARIANT (1)..(16): Xaa = Any Amino Acid
CCEXFXCCNPACTGXC

SEQ ID NO: 6631 - protein, 17 aa, Artificial Sequence
  Synthetically generated peptide
  VARIANT (1)..(17): Xaa = Any Amino Acid
CCEXFXCCNPACTGXXC

SEQ ID NO: 6632 - protein, 15 aa, Artificial Sequence
  Synthetically generated peptide
  VARIANT (1)..(15): Xaa = Any Amino Acid
CCEXFCCXNPACTGC

SEQ ID NO: 6633 - protein, 16 aa, Artificial Sequence
  Synthetically generated peptide
  VARIANT (1)..(16): Xaa = Any Amino Acid
CCEXFCCXXNPACTGC

SEQ ID NO: 6634 - protein, 17 aa, Artificial Sequence
  Synthetically generated peptide
  VARIANT (1)..(17): Xaa = Any Amino Acid
CCEXFCCXXXNPACTGC

SEQ ID NO: 6635 - protein, 17 aa, Artificial Sequence
  Synthetically generated peptide
  VARIANT (1)..(17): Xaa = Any Amino Acid
CCEXFCCXXNXPACTGC

SEQ ID NO: 6636 - protein, 17 aa, Artificial Sequence
  Synthetically generated peptide
  VARIANT (1)..(17): Xaa = Any Amino Acid
CCEXFCCXXNPXACTGC

SEQ ID NO: 6637 - protein, 17 aa, Artificial Sequence
  Synthetically generated peptide
  VARIANT (1)..(17): Xaa = Any Amino Acid
CCEXFCCXXNPAXCTGC

SEQ ID NO: 6638 - protein, 17 aa, Artificial Sequence
  Synthetically generated peptide
  VARIANT (1)..(17): Xaa = Any Amino Acid
CCEXFCCXXNPACXTGC

SEQ ID NO: 6639 - protein, 17 aa, Artificial Sequence
  Synthetically generated peptide
  VARIANT (1)..(17): Xaa = Any Amino Acid
CCEXFCCXXNPACTXGC

SEQ ID NO: 6640 - protein, 17 aa, Artificial Sequence
  Synthetically generated peptide
  VARIANT (1)..(17): Xaa = Any Amino Acid
CCEXFCCXXNPACTGXC

SEQ ID NO: 6641 - protein, 16 aa, Artificial Sequence
  Synthetically generated peptide
  VARIANT (1)..(16): Xaa = Any Amino Acid
CCEXFCCXNXPACTGC

SEQ ID NO: 6642 - protein, 17 aa, Artificial Sequence
  Synthetically generated peptide
  VARIANT (1)..(17): Xaa = Any Amino Acid
CCEXFCCXNXXPACTGC

SEQ ID NO: 6643 - protein, 17 aa, Artificial Sequence
  Synthetically generated peptide
  VARIANT (1)..(17): Xaa = Any Amino Acid
CCEXFCCXNXPXACTGC

SEQ ID NO: 6644 - protein, 17 aa, Artificial Sequence
  Synthetically generated peptide
  VARIANT (1)..(17): Xaa = Any Amino Acid
CCEXFCCXNXPAXCTGC

SEQ ID NO: 6645 - protein, 17 aa, Artificial Sequence
  Synthetically generated peptide
  VARIANT (1)..(17): Xaa = Any Amino Acid
CCEXFCCXNXPACXTGC

SEQ ID NO: 6646 - protein, 17 aa, Artificial Sequence
  Synthetically generated peptide
  VARIANT (1)..(17): Xaa = Any Amino Acid
CCEXFCCXNXPACTXGC

SEQ ID NO: 6647 - protein, 17 aa, Artificial Sequence
  Synthetically generated peptide
  VARIANT (1)..(17): Xaa = Any Amino Acid
CCEXFCCXNXPACTGXC

SEQ ID NO: 6648 - protein, 16 aa, Artificial Sequence
  Synthetically generated peptide
  VARIANT (1)..(16): Xaa = Any Amino Acid
CCEXFCCXNPXACTGC

SEQ ID NO: 6649 - protein, 17 aa, Artificial Sequence
  Synthetically generated peptide
  VARIANT (1)..(17): Xaa = Any Amino Acid
CCEXFCCXNPXXACTGC

SEQ ID NO: 6650 - protein, 17 aa, Artificial Sequence
  Synthetically generated peptide
  VARIANT (1)..(17): Xaa = Any Amino Acid
CCEXFCCXNPXAXCTGC

SEQ ID NO: 6651 - protein, 17 aa, Artificial Sequence
  Synthetically generated peptide
  VARIANT (1)..(17): Xaa = Any Amino Acid
CCEXFCCXNPXACXTGC

SEQ ID NO: 6652 - protein, 17 aa, Artificial Sequence
  Synthetically generated peptide
  VARIANT (1)..(17): Xaa = Any Amino Acid
CCEXFCCXNPXACTXGC

SEQ ID NO: 6653 - protein, 17 aa, Artificial Sequence
  Synthetically generated peptide
  VARIANT (1)..(17): Xaa = Any Amino Acid
CCEXFCCXNPXACTGXC

SEQ ID NO: 6654 - protein, 16 aa, Artificial Sequence
  Synthetically generated peptide
  VARIANT (1)..(16): Xaa = Any Amino Acid
CCEXFCCXNPAXCTGC

SEQ ID NO: 6655 - protein, 17 aa, Artificial Sequence
  Synthetically generated peptide
  VARIANT (1)..(17): Xaa = Any Amino Acid
CCEXFCCXNPAXXCTGC

SEQ ID NO: 6656 - protein, 17 aa, Artificial Sequence
  Synthetically generated peptide
  VARIANT (1)..(17): Xaa = Any Amino Acid
CCEXFCCXNPAXCXTGC

SEQ ID NO: 6657 - protein, 17 aa, Artificial Sequence
  Synthetically generated peptide
  VARIANT (1)..(17): Xaa = Any Amino Acid
CCEXFCCXNPAXCTXGC

SEQ ID NO: 6658 - protein, 17 aa, Artificial Sequence
  Synthetically generated peptide
  VARIANT (1)..(17): Xaa = Any Amino Acid
CCEXFCCXNPAXCTGXC

SEQ ID NO: 6659 - protein, 16 aa, Artificial Sequence
  Synthetically generated peptide
  VARIANT (1)..(16): Xaa = Any Amino Acid
CCEXFCCXNPACXTGC

SEQ ID NO: 6660 - protein, 17 aa, Artificial Sequence
  Synthetically generated peptide
  VARIANT (1)..(17): Xaa = Any Amino Acid
CCEXFCCXNPACXXTGC

SEQ ID NO: 6661 - protein, 17 aa, Artificial Sequence
  Synthetically generated peptide
  VARIANT (1)..(17): Xaa = Any Amino Acid
CCEXFCCXNPACXTXGC

SEQ ID NO: 6662 - protein, 17 aa, Artificial Sequence
  Synthetically generated peptide
  VARIANT (1)..(17): Xaa = Any Amino Acid
CCEXFCCXNPACXTGXC

SEQ ID NO: 6663 - protein, 16 aa, Artificial Sequence
  Synthetically generated peptide
  VARIANT (1)..(16): Xaa = Any Amino Acid
CCEXFCCXNPACTXGC

SEQ ID NO: 6664 - protein, 17 aa, Artificial Sequence
  Synthetically generated peptide
  VARIANT (1)..(17): Xaa = Any Amino Acid
CCEXFCCXNPACTXXGC

SEQ ID NO: 6665 - protein, 17 aa, Artificial Sequence
  Synthetically generated peptide
  VARIANT (1)..(17): Xaa = Any Amino Acid
CCEXFCCXNPACTXGXC

SEQ ID NO: 6666 - protein, 16 aa, Artificial Sequence
  Synthetically generated peptide
  VARIANT (1)..(16): Xaa = Any Amino Acid
CCEXFCCXNPACTGXC

SEQ ID NO: 6667 - protein, 17 aa, Artificial Sequence
  Synthetically generated peptide
  VARIANT (1)..(17): Xaa = Any Amino Acid
CCEXFCCXNPACTGXXC

SEQ ID NO: 6668 - protein, 15 aa, Artificial Sequence
  Synthetically generated peptide
  VARIANT (1)..(15): Xaa = Any Amino Acid
CCEXFCCNXPACTGC

SEQ ID NO: 6669 - protein, 16 aa, Artificial Sequence
  Synthetically generated peptide
  VARIANT (1)..(16): Xaa = Any Amino Acid
CCEXFCCNXXPACTGC

SEQ ID NO: 6670 - protein, 17 aa, Artificial Sequence
  Synthetically generated peptide
  VARIANT (1)..(17): Xaa = Any Amino Acid
CCEXFCCNXXXPACTGC

SEQ ID NO: 6671 - protein, 17 aa, Artificial Sequence
  Synthetically generated peptide
  VARIANT (1)..(17): Xaa = Any Amino Acid
CCEXFCCNXXPXACTGC

SEQ ID NO: 6672 - protein, 17 aa, Artificial Sequence
  Synthetically generated peptide
  VARIANT (1)..(17): Xaa = Any Amino Acid
CCEXFCCNXXPAXCTGC

SEQ ID NO: 6673 - protein, 17 aa, Artificial Sequence
  Synthetically generated peptide
  VARIANT (1)..(17): Xaa = Any Amino Acid
CCEXFCCNXXPACXTGC

SEQ ID NO: 6674 - protein, 17 aa, Artificial Sequence
  Synthetically generated peptide
  VARIANT (1)..(17): Xaa = Any Amino Acid
CCEXFCCNXXPACTXGC

SEQ ID NO: 6675 - protein, 17 aa, Artificial Sequence
  Synthetically generated peptide
  VARIANT (1)..(17): Xaa = Any Amino Acid
CCEXFCCNXXPACTGXC

SEQ ID NO: 6676 - protein, 16 aa, Artificial Sequence
  Synthetically generated peptide
  VARIANT (1)..(16): Xaa = Any Amino Acid
CCEXFCCNXPXACTGC

SEQ ID NO: 6677 - protein, 17 aa, Artificial Sequence
  Synthetically generated peptide
  VARIANT (1)..(17): Xaa = Any Amino Acid
CCEXFCCNXPXXACTGC

SEQ ID NO: 6678 - protein, 17 aa, Artificial Sequence
  Synthetically generated peptide
  VARIANT (1)..(17): Xaa = Any Amino Acid
CCEXFCCNXPXAXCTGC

SEQ ID NO: 6679 - protein, 17 aa, Artificial Sequence
  Synthetically generated peptide
  VARIANT (1)..(17): Xaa = Any Amino Acid
CCEXFCCNXPXACXTGC

SEQ ID NO: 6680 - protein, 17 aa, Artificial Sequence
  Synthetically generated peptide
  VARIANT (1)..(17): Xaa = Any Amino Acid
CCEXFCCNXPXACTXGC

SEQ ID NO: 6681 - protein, 17 aa, Artificial Sequence
  Synthetically generated peptide
  VARIANT (1)..(17): Xaa = Any Amino Acid
CCEXFCCNXPXACTGXC

SEQ ID NO: 6682 - protein, 16 aa, Artificial Sequence
  Synthetically generated peptide
  VARIANT (1)..(16): Xaa = Any Amino Acid
CCEXFCCNXPAXCTGC

SEQ ID NO: 6683 - protein, 17 aa, Artificial Sequence
  Synthetically generated peptide
  VARIANT (1)..(17): Xaa = Any Amino Acid
CCEXFCCNXPAXXCTGC

SEQ ID NO: 6684 - protein, 17 aa, Artificial Sequence
  Synthetically generated peptide
  VARIANT (1)..(17): Xaa = Any Amino Acid
CCEXFCCNXPAXCXTGC

SEQ ID NO: 6685 - protein, 17 aa, Artificial Sequence
  Synthetically generated peptide
  VARIANT (1)..(17): Xaa = Any Amino Acid
CCEXFCCNXPAXCTXGC

SEQ ID NO: 6686 - protein, 17 aa, Artificial Sequence
  Synthetically generated peptide
  VARIANT (1)..(17): Xaa = Any Amino Acid
CCEXFCCNXPAXCTGXC

SEQ ID NO: 6687 - protein, 16 aa, Artificial Sequence
  Synthetically generated peptide
  VARIANT (1)..(16): Xaa = Any Amino Acid
CCEXFCCNXPACXTGC

SEQ ID NO: 6688 - protein, 17 aa, Artificial Sequence
  Synthetically generated peptide
  VARIANT (1)..(17): Xaa = Any Amino Acid
CCEXFCCNXPACXXTGC

SEQ ID NO: 6689 - protein, 17 aa, Artificial Sequence
  Synthetically generated peptide
  VARIANT (1)..(17): Xaa = Any Amino Acid
CCEXFCCNXPACXTXGC

SEQ ID NO: 6690 - protein, 17 aa, Artificial Sequence
  Synthetically generated peptide
  VARIANT (1)..(17): Xaa = Any Amino Acid
CCEXFCCNXPACXTGXC

SEQ ID NO: 6691 - protein, 16 aa, Artificial Sequence
  Synthetically generated peptide
  VARIANT (1)..(16): Xaa = Any Amino Acid
CCEXFCCNXPACTXGC

SEQ ID NO: 6692 - protein, 17 aa, Artificial Sequence
  Synthetically generated peptide
  VARIANT (1)..(17): Xaa = Any Amino Acid
CCEXFCCNXPACTXXGC

SEQ ID NO: 6693 - protein, 17 aa, Artificial Sequence
  Synthetically generated peptide
  VARIANT (1)..(17): Xaa = Any Amino Acid
CCEXFCCNXPACTXGXC

SEQ ID NO: 6694 - protein, 16 aa, Artificial Sequence
  Synthetically generated peptide
  VARIANT (1)..(16): Xaa = Any Amino Acid
CCEXFCCNXPACTGXC

SEQ ID NO: 6695 - protein, 17 aa, Artificial Sequence
  Synthetically generated peptide
  VARIANT (1)..(17): Xaa = Any Amino Acid
CCEXFCCNXPACTGXXC

SEQ ID NO: 6696 - protein, 15 aa, Artificial Sequence
  Synthetically generated peptide
  VARIANT (1)..(15): Xaa = Any Amino Acid
CCEXFCCNPXACTGC

SEQ ID NO: 6697 - protein, 16 aa, Artificial Sequence
  Synthetically generated peptide
  VARIANT (1)..(16): Xaa = Any Amino Acid
CCEXFCCNPXXACTGC

SEQ ID NO: 6698 - protein, 17 aa, Artificial Sequence
  Synthetically generated peptide
  VARIANT (1)..(17): Xaa = Any Amino Acid
CCEXFCCNPXXXACTGC

SEQ ID NO: 6699 - protein, 17 aa, Artificial Sequence
  Synthetically generated peptide
  VARIANT (1)..(17): Xaa = Any Amino Acid
CCEXFCCNPXXAXCTGC

SEQ ID NO: 6700 - protein, 17 aa, Artificial Sequence
  Synthetically generated peptide
  VARIANT (1)..(17): Xaa = Any Amino Acid
CCEXFCCNPXXACXTGC

SEQ ID NO: 6701 - protein, 17 aa, Artificial Sequence
  Synthetically generated peptide
  VARIANT (1)..(17): Xaa = Any Amino Acid
CCEXFCCNPXXACTXGC

SEQ ID NO: 6702 - protein, 17 aa, Artificial Sequence
  Synthetically generated peptide
  VARIANT (1)..(17): Xaa = Any Amino Acid
CCEXFCCNPXXACTGXC

SEQ ID NO: 6703 - protein, 16 aa, Artificial Sequence
  Synthetically generated peptide
  VARIANT (1)..(16): Xaa = Any Amino Acid
CCEXFCCNPXAXCTGC

SEQ ID NO: 6704 - protein, 17 aa, Artificial Sequence
  Synthetically generated peptide
  VARIANT (1)..(17): Xaa = Any Amino Acid
CCEXFCCNPXAXXCTGC

SEQ ID NO: 6705 - protein, 17 aa, Artificial Sequence
  Synthetically generated peptide
  VARIANT (1)..(17): Xaa = Any Amino Acid
CCEXFCCNPXAXCXTGC

SEQ ID NO: 6706 - protein, 17 aa, Artificial Sequence
  Synthetically generated peptide
  VARIANT (1)..(17): Xaa = Any Amino Acid
CCEXFCCNPXAXCTXGC

SEQ ID NO: 6707 - protein, 17 aa, Artificial Sequence
  Synthetically generated peptide
  VARIANT (1)..(17): Xaa = Any Amino Acid
CCEXFCCNPXAXCTGXC

SEQ ID NO: 6708 - protein, 16 aa, Artificial Sequence
  Synthetically generated peptide
  VARIANT (1)..(16): Xaa = Any Amino Acid
CCEXFCCNPXACXTGC

SEQ ID NO: 6709 - protein, 17 aa, Artificial Sequence
  Synthetically generated peptide
  VARIANT (1)..(17): Xaa = Any Amino Acid
CCEXFCCNPXACXXTGC

SEQ ID NO: 6710 - protein, 17 aa, Artificial Sequence
  Synthetically generated peptide
  VARIANT (1)..(17): Xaa = Any Amino Acid
CCEXFCCNPXACXTXGC

SEQ ID NO: 6711 - protein, 17 aa, Artificial Sequence
  Synthetically generated peptide
  VARIANT (1)..(17): Xaa = Any Amino Acid
CCEXFCCNPXACXTGXC

SEQ ID NO: 6712 - protein, 16 aa, Artificial Sequence
  Synthetically generated peptide
  VARIANT (1)..(16): Xaa = Any Amino Acid
CCEXFCCNPXACTXGC

SEQ ID NO: 6713 - protein, 17 aa, Artificial Sequence
  Synthetically generated peptide
  VARIANT (1)..(17): Xaa = Any Amino Acid
CCEXFCCNPXACTXXGC

SEQ ID NO: 6714 - protein, 17 aa, Artificial Sequence
  Synthetically generated peptide
  VARIANT (1)..(17): Xaa = Any Amino Acid
CCEXFCCNPXACTXGXC

SEQ ID NO: 6715 - protein, 16 aa, Artificial Sequence
  Synthetically generated peptide
  VARIANT (1)..(16): Xaa = Any Amino Acid
CCEXFCCNPXACTGXC

SEQ ID NO: 6716 - protein, 17 aa, Artificial Sequence
  Synthetically generated peptide
  VARIANT (1)..(17): Xaa = Any Amino Acid
CCEXFCCNPXACTGXXC

SEQ ID NO: 6717 - protein, 15 aa, Artificial Sequence
  Synthetically generated peptide
  VARIANT (1)..(15): Xaa = Any Amino Acid
CCEXFCCNPAXCTGC

SEQ ID NO: 6718 - protein, 16 aa, Artificial Sequence
  Synthetically generated peptide
  VARIANT (1)..(16): Xaa = Any Amino Acid
CCEXFCCNPAXXCTGC

SEQ ID NO: 6719 - protein, 17 aa, Artificial Sequence
  Synthetically generated peptide
  VARIANT (1)..(17): Xaa = Any Amino Acid
CCEXFCCNPAXXXCTGC

SEQ ID NO: 6720 - protein, 17 aa, Artificial Sequence
  Synthetically generated peptide
  VARIANT (1)..(17): Xaa = Any Amino Acid
CCEXFCCNPAXXCXTGC

SEQ ID NO: 6721 - protein, 17 aa, Artificial Sequence
  Synthetically generated peptide
  VARIANT (1)..(17): Xaa = Any Amino Acid
CCEXFCCNPAXXCTXGC

SEQ ID NO: 6722 - protein, 17 aa, Artificial Sequence
  Synthetically generated peptide
  VARIANT (1)..(17): Xaa = Any Amino Acid
CCEXFCCNPAXXCTGXC

SEQ ID NO: 6723 - protein, 16 aa, Artificial Sequence
  Synthetically generated peptide
  VARIANT (1)..(16): Xaa = Any Amino Acid
CCEXFCCNPAXCXTGC

SEQ ID NO: 6724 - protein, 17 aa, Artificial Sequence
  Synthetically generated peptide
  VARIANT (1)..(17): Xaa = Any Amino Acid
CCEXFCCNPAXCXXTGC

SEQ ID NO: 6725 - protein, 17 aa, Artificial Sequence
  Synthetically generated peptide
  VARIANT (1)..(17): Xaa = Any Amino Acid
CCEXFCCNPAXCXTXGC

SEQ ID NO: 6726 - protein, 17 aa, Artificial Sequence
  Synthetically generated peptide
  VARIANT (1)..(17): Xaa = Any Amino Acid
CCEXFCCNPAXCXTGXC

SEQ ID NO: 6727 - protein, 16 aa, Artificial Sequence
  Synthetically generated peptide
  VARIANT (1)..(16): Xaa = Any Amino Acid
CCEXFCCNPAXCTXGC

SEQ ID NO: 6728 - protein, 17 aa, Artificial Sequence
  Synthetically generated peptide
  VARIANT (1)..(17): Xaa = Any Amino Acid
CCEXFCCNPAXCTXXGC

SEQ ID NO: 6729 - protein, 17 aa, Artificial Sequence
  Synthetically generated peptide
  VARIANT (1)..(17): Xaa = Any Amino Acid
CCEXFCCNPAXCTXGXC

SEQ ID NO: 6730 - protein, 16 aa, Artificial Sequence
  Synthetically generated peptide
  VARIANT (1)..(16): Xaa = Any Amino Acid
CCEXFCCNPAXCTGXC

SEQ ID NO: 6731 - protein, 17 aa, Artificial Sequence
  Synthetically generated peptide
  VARIANT (1)..(17): Xaa = Any Amino Acid
CCEXFCCNPAXCTGXXC

SEQ ID NO: 6732 - protein, 15 aa, Artificial Sequence
  Synthetically generated peptide
  VARIANT (1)..(15): Xaa = Any Amino Acid
CCEXFCCNPACXTGC

SEQ ID NO: 6733 - protein, 16 aa, Artificial Sequence
  Synthetically generated peptide
  VARIANT (1)..(16): Xaa = Any Amino Acid
CCEXFCCNPACXXTGC

SEQ ID NO: 6734 - protein, 17 aa, Artificial Sequence
  Synthetically generated peptide
  VARIANT (1)..(17): Xaa = Any Amino Acid
CCEXFCCNPACXXXTGC

SEQ ID NO: 6735 - protein, 17 aa, Artificial Sequence
  Synthetically generated peptide
  VARIANT (1)..(17): Xaa = Any Amino Acid
CCEXFCCNPACXXTXGC

SEQ ID NO: 6736 - protein, 17 aa, Artificial Sequence
  Synthetically generated peptide
  VARIANT (1)..(17): Xaa = Any Amino Acid
CCEXFCCNPACXXTGXC

SEQ ID NO: 6737 - protein, 16 aa, Artificial Sequence
  Synthetically generated peptide
  VARIANT (1)..(16): Xaa = Any Amino Acid
CCEXFCCNPACXTXGC

SEQ ID NO: 6738 - protein, 17 aa, Artificial Sequence
  Synthetically generated peptide
  VARIANT (1)..(17): Xaa = Any Amino Acid
CCEXFCCNPACXTXXGC

SEQ ID NO: 6739 - protein, 17 aa, Artificial Sequence
  Synthetically generated peptide
  VARIANT (1)..(17): Xaa = Any Amino Acid
CCEXFCCNPACXTXGXC

SEQ ID NO: 6740 - protein, 16 aa, Artificial Sequence
  Synthetically generated peptide
  VARIANT (1)..(16): Xaa = Any Amino Acid
CCEXFCCNPACXTGXC

SEQ ID NO: 6741 - protein, 17 aa, Artificial Sequence
  Synthetically generated peptide
  VARIANT (1)..(17): Xaa = Any Amino Acid
CCEXFCCNPACXTGXXC

SEQ ID NO: 6742 - protein, 15 aa, Artificial Sequence
  Synthetically generated peptide
  VARIANT (1)..(15): Xaa = Any Amino Acid
CCEXFCCNPACTXGC

SEQ ID NO: 6743 - protein, 16 aa, Artificial Sequence
  Synthetically generated peptide
  VARIANT (1)..(16): Xaa = Any Amino Acid
CCEXFCCNPACTXXGC

SEQ ID NO: 6744 - protein, 17 aa, Artificial Sequence
  Synthetically generated peptide
  VARIANT (1)..(17): Xaa = Any Amino Acid
CCEXFCCNPACTXXXGC

SEQ ID NO: 6745 - protein, 17 aa, Artificial Sequence
  Synthetically generated peptide
  VARIANT (1)..(17): Xaa = Any Amino Acid
CCEXFCCNPACTXXGXC

SEQ ID NO: 6746 - protein, 16 aa, Artificial Sequence
  Synthetically generated peptide
  VARIANT (1)..(16): Xaa = Any Amino Acid
CCEXFCCNPACTXGXC

SEQ ID NO: 6747 - protein, 17 aa, Artificial Sequence
  Synthetically generated peptide
  VARIANT (1)..(17): Xaa = Any Amino Acid
CCEXFCCNPACTXGXXC

SEQ ID NO: 6748 - protein, 15 aa, Artificial Sequence
  Synthetically generated peptide
  VARIANT (1)..(15): Xaa = Any Amino Acid
CCEXFCCNPACTGXC

SEQ ID NO: 6749 - protein, 16 aa, Artificial Sequence
  Synthetically generated peptide
  VARIANT (1)..(16): Xaa = Any Amino Acid
CCEXFCCNPACTGXXC

SEQ ID NO: 6750 - protein, 17 aa, Artificial Sequence
  Synthetically generated peptide
  VARIANT (1)..(17): Xaa = Any Amino Acid
CCEXFCCNPACTGXXXC

SEQ ID NO: 6751 - protein, 14 aa, Artificial Sequence
  Synthetically generated peptide
  VARIANT (1)..(14): Xaa = Any Amino Acid
CCEFXCCNPACTGC

SEQ ID NO: 6752 - protein, 15 aa, Artificial Sequence
  Synthetically generated peptide
  VARIANT (1)..(15): Xaa = Any Amino Acid
CCEFXXCCNPACTGC

SEQ ID NO: 6753 - protein, 16 aa, Artificial Sequence
  Synthetically generated peptide
  VARIANT (1)..(16): Xaa = Any Amino Acid
CCEFXXXCCNPACTGC

SEQ ID NO: 6754 - protein, 17 aa, Artificial Sequence
  Synthetically generated peptide
  VARIANT (1)..(17): Xaa = Any Amino Acid
CCEFXXXXCCNPACTGC

SEQ ID NO: 6755 - protein, 17 aa, Artificial Sequence
  Synthetically generated peptide
  VARIANT (1)..(17): Xaa = Any Amino Acid
CCEFXXXCCXNPACTGC

SEQ ID NO: 6756 - protein, 17 aa, Artificial Sequence
  Synthetically generated peptide
  VARIANT (1)..(17): Xaa = Any Amino Acid
CCEFXXXCCNXPACTGC

SEQ ID NO: 6757 - protein, 17 aa, Artificial Sequence
  Synthetically generated peptide
  VARIANT (1)..(17): Xaa = Any Amino Acid
CCEFXXXCCNPXACTGC

SEQ ID NO: 6758 - protein, 17 aa, Artificial Sequence
  Synthetically generated peptide
  VARIANT (1)..(17): Xaa = Any Amino Acid
CCEFXXXCCNPAXCTGC

SEQ ID NO: 6759 - protein, 17 aa, Artificial Sequence
  Synthetically generated peptide
  VARIANT (1)..(17): Xaa = Any Amino Acid
CCEFXXXCCNPACXTGC

SEQ ID NO: 6760 - protein, 17 aa, Artificial Sequence
  Synthetically generated peptide
  VARIANT (1)..(17): Xaa = Any Amino Acid
CCEFXXXCCNPACTXGC

SEQ ID NO: 6761 - protein, 17 aa, Artificial Sequence
  Synthetically generated peptide
  VARIANT (1)..(17): Xaa = Any Amino Acid
CCEFXXXCCNPACTGXC

SEQ ID NO: 6762 - protein, 16 aa, Artificial Sequence
  Synthetically generated peptide
  VARIANT (1)..(16): Xaa = Any Amino Acid
CCEFXXCCXNPACTGC

SEQ ID NO: 6763 - protein, 17 aa, Artificial Sequence
  Synthetically generated peptide
  VARIANT (1)..(17): Xaa = Any Amino Acid
CCEFXXCCXXNPACTGC

SEQ ID NO: 6764 - protein, 17 aa, Artificial Sequence
  Synthetically generated peptide
  VARIANT (1)..(17): Xaa = Any Amino Acid
CCEFXXCCXNXPACTGC

SEQ ID NO: 6765 - protein, 17 aa, Artificial Sequence
  Synthetically generated peptide
  VARIANT (1)..(17): Xaa = Any Amino Acid
CCEFXXCCXNPXACTGC

SEQ ID NO: 6766 - protein, 17 aa, Artificial Sequence
  Synthetically generated peptide
  VARIANT (1)..(17): Xaa = Any Amino Acid
CCEFXXCCXNPAXCTGC

SEQ ID NO: 6767 - protein, 17 aa, Artificial Sequence
  Synthetically generated peptide
  VARIANT (1)..(17): Xaa = Any Amino Acid
CCEFXXCCXNPACXTGC

SEQ ID NO: 6768 - protein, 17 aa, Artificial Sequence
  Synthetically generated peptide
  VARIANT (1)..(17): Xaa = Any Amino Acid
CCEFXXCCXNPACTXGC

SEQ ID NO: 6769 - protein, 17 aa, Artificial Sequence
  Synthetically generated peptide
  VARIANT (1)..(17): Xaa = Any Amino Acid
CCEFXXCCXNPACTGXC

SEQ ID NO: 6770 - protein, 16 aa, Artificial Sequence
  Synthetically generated peptide
  VARIANT (1)..(16): Xaa = Any Amino Acid
CCEFXXCCNXPACTGC

SEQ ID NO: 6771 - protein, 17 aa, Artificial Sequence
  Synthetically generated peptide
  VARIANT (1)..(17): Xaa = Any Amino Acid
CCEFXXCCNXXPACTGC

SEQ ID NO: 6772 - protein, 17 aa, Artificial Sequence
  Synthetically generated peptide
  VARIANT (1)..(17): Xaa = Any Amino Acid
CCEFXXCCNXPXACTGC

SEQ ID NO: 6773 - protein, 17 aa, Artificial Sequence
  Synthetically generated peptide
  VARIANT (1)..(17): Xaa = Any Amino Acid
CCEFXXCCNXPAXCTGC

SEQ ID NO: 6774 - protein, 17 aa, Artificial Sequence
  Synthetically generated peptide
  VARIANT (1)..(17): Xaa = Any Amino Acid
CCEFXXCCNXPACXTGC

SEQ ID NO: 6775 - protein, 17 aa, Artificial Sequence
  Synthetically generated peptide
  VARIANT (1)..(17): Xaa = Any Amino Acid
CCEFXXCCNXPACTXGC

SEQ ID NO: 6776 - protein, 17 aa, Artificial Sequence
  Synthetically generated peptide
  VARIANT (1)..(17): Xaa = Any Amino Acid
CCEFXXCCNXPACTGXC

SEQ ID NO: 6777 - protein, 16 aa, Artificial Sequence
  Synthetically generated peptide
  VARIANT (1)..(16): Xaa = Any Amino Acid
CCEFXXCCNPXACTGC

SEQ ID NO: 6778 - protein, 17 aa, Artificial Sequence
  Synthetically generated peptide
  VARIANT (1)..(17): Xaa = Any Amino Acid
CCEFXXCCNPXXACTGC

SEQ ID NO: 6779 - protein, 17 aa, Artificial Sequence
  Synthetically generated peptide
  VARIANT (1)..(17): Xaa = Any Amino Acid
CCEFXXCCNPXAXCTGC

SEQ ID NO: 6780 - protein, 17 aa, Artificial Sequence
  Synthetically generated peptide
  VARIANT (1)..(17): Xaa = Any Amino Acid
CCEFXXCCNPXACXTGC

SEQ ID NO: 6781 - protein, 17 aa, Artificial Sequence
  Synthetically generated peptide
  VARIANT (1)..(17): Xaa = Any Amino Acid
CCEFXXCCNPXACTXGC

SEQ ID NO: 6782 - protein, 17 aa, Artificial Sequence
  Synthetically generated peptide
  VARIANT (1)..(17): Xaa = Any Amino Acid
CCEFXXCCNPXACTGXC

SEQ ID NO: 6783 - protein, 16 aa, Artificial Sequence
  Synthetically generated peptide
  VARIANT (1)..(16): Xaa = Any Amino Acid
CCEFXXCCNPAXCTGC

SEQ ID NO: 6784 - protein, 17 aa, Artificial Sequence
  Synthetically generated peptide
  VARIANT (1)..(17): Xaa = Any Amino Acid
CCEFXXCCNPAXXCTGC

SEQ ID NO: 6785 - protein, 17 aa, Artificial Sequence
  Synthetically generated peptide
  VARIANT (1)..(17): Xaa = Any Amino Acid
CCEFXXCCNPAXCXTGC

SEQ ID NO: 6786 - protein, 17 aa, Artificial Sequence
  Synthetically generated peptide
  VARIANT (1)..(17): Xaa = Any Amino Acid
CCEFXXCCNPAXCTXGC

SEQ ID NO: 6787 - protein, 17 aa, Artificial Sequence
  Synthetically generated peptide
  VARIANT (1)..(17): Xaa = Any Amino Acid
CCEFXXCCNPAXCTGXC

SEQ ID NO: 6788 - protein, 16 aa, Artificial Sequence
  Synthetically generated peptide
  VARIANT (1)..(16): Xaa = Any Amino Acid
CCEFXXCCNPACXTGC

SEQ ID NO: 6789 - protein, 17 aa, Artificial Sequence
  Synthetically generated peptide
  VARIANT (1)..(17): Xaa = Any Amino Acid
CCEFXXCCNPACXXTGC

SEQ ID NO: 6790 - protein, 17 aa, Artificial Sequence
  Synthetically generated peptide
  VARIANT (1)..(17): Xaa = Any Amino Acid
CCEFXXCCNPACXTXGC

SEQ ID NO: 6791 - protein, 17 aa, Artificial Sequence
  Synthetically generated peptide
  VARIANT (1)..(17): Xaa = Any Amino Acid
CCEFXXCCNPACXTGXC

SEQ ID NO: 6792 - protein, 16 aa, Artificial Sequence
  Synthetically generated peptide
  VARIANT (1)..(16): Xaa = Any Amino Acid
CCEFXXCCNPACTXGC

SEQ ID NO: 6793 - protein, 17 aa, Artificial Sequence
  Synthetically generated peptide
  VARIANT (1)..(17): Xaa = Any Amino Acid
CCEFXXCCNPACTXXGC

SEQ ID NO: 6794 - protein, 17 aa, Artificial Sequence
  Synthetically generated peptide
  VARIANT (1)..(17): Xaa = Any Amino Acid
CCEFXXCCNPACTXGXC

SEQ ID NO: 6795 - protein, 16 aa, Artificial Sequence
  Synthetically generated peptide
  VARIANT (1)..(16): Xaa = Any Amino Acid
CCEFXXCCNPACTGXC

SEQ ID NO: 6796 - protein, 17 aa, Artificial Sequence
  Synthetically generated peptide
  VARIANT (1)..(17): Xaa = Any Amino Acid
CCEFXXCCNPACTGXXC

SEQ ID NO: 6797 - protein, 15 aa, Artificial Sequence
  Synthetically generated peptide
  VARIANT (1)..(15): Xaa = Any Amino Acid
CCEFXCCXNPACTGC

SEQ ID NO: 6798 - protein, 16 aa, Artificial Sequence
  Synthetically generated peptide
  VARIANT (1)..(16): Xaa = Any Amino Acid
CCEFXCCXXNPACTGC

SEQ ID NO: 6799 - protein, 17 aa, Artificial Sequence
  Synthetically generated peptide
  VARIANT (1)..(17): Xaa = Any Amino Acid
CCEFXCCXXXNPACTGC

SEQ ID NO: 6800 - protein, 17 aa, Artificial Sequence
  Synthetically generated peptide
  VARIANT (1)..(17): Xaa = Any Amino Acid
CCEFXCCXXNXPACTGC

SEQ ID NO: 6801 - protein, 17 aa, Artificial Sequence
  Synthetically generated peptide
  VARIANT (1)..(17): Xaa = Any Amino Acid
CCEFXCCXXNPXACTGC

SEQ ID NO: 6802 - protein, 17 aa, Artificial Sequence
  Synthetically generated peptide
  VARIANT (1)..(17): Xaa = Any Amino Acid
CCEFXCCXXNPAXCTGC

SEQ ID NO: 6803 - protein, 17 aa, Artificial Sequence
  Synthetically generated peptide
  VARIANT (1)..(17): Xaa = Any Amino Acid
CCEFXCCXXNPACXTGC

SEQ ID NO: 6804 - protein, 17 aa, Artificial Sequence
  Synthetically generated peptide
  VARIANT (1)..(17): Xaa = Any Amino Acid
CCEFXCCXXNPACTXGC

SEQ ID NO: 6805 - protein, 17 aa, Artificial Sequence
  Synthetically generated peptide
  VARIANT (1)..(17): Xaa = Any Amino Acid
CCEFXCCXXNPACTGXC

SEQ ID NO: 6806 - protein, 16 aa, Artificial Sequence
  Synthetically generated peptide
  VARIANT (1)..(16): Xaa = Any Amino Acid
CCEFXCCXNXPACTGC

SEQ ID NO: 6807 - protein, 17 aa, Artificial Sequence
  Synthetically generated peptide
  VARIANT (1)..(17): Xaa = Any Amino Acid
CCEFXCCXNXXPACTGC

SEQ ID NO: 6808 - protein, 17 aa, Artificial Sequence
  Synthetically generated peptide
  VARIANT (1)..(17): Xaa = Any Amino Acid
CCEFXCCXNXPXACTGC

SEQ ID NO: 6809 - protein, 17 aa, Artificial Sequence
  Synthetically generated peptide
  VARIANT (1)..(17): Xaa = Any Amino Acid
CCEFXCCXNXPAXCTGC

SEQ ID NO: 6810 - protein, 17 aa, Artificial Sequence
  Synthetically generated peptide
  VARIANT (1)..(17): Xaa = Any Amino Acid
CCEFXCCXNXPACXTGC

SEQ ID NO: 6811 - protein, 17 aa, Artificial Sequence
  Synthetically generated peptide
  VARIANT (1)..(17): Xaa = Any Amino Acid
CCEFXCCXNXPACTXGC

SEQ ID NO: 6812 - protein, 17 aa, Artificial Sequence
  Synthetically generated peptide
  VARIANT (1)..(17): Xaa = Any Amino Acid
CCEFXCCXNXPACTGXC

SEQ ID NO: 6813 - protein, 16 aa, Artificial Sequence
  Synthetically generated peptide
  VARIANT (1)..(16): Xaa = Any Amino Acid
CCEFXCCXNPXACTGC

SEQ ID NO: 6814 - protein, 17 aa, Artificial Sequence
  Synthetically generated peptide
  VARIANT (1)..(17): Xaa = Any Amino Acid
CCEFXCCXNPXXACTGC

SEQ ID NO: 6815 - protein, 17 aa, Artificial Sequence
  Synthetically generated peptide
  VARIANT (1)..(17): Xaa = Any Amino Acid
CCEFXCCXNPXAXCTGC

SEQ ID NO: 6816 - protein, 17 aa, Artificial Sequence
  Synthetically generated peptide
  VARIANT (1)..(17): Xaa = Any Amino Acid
CCEFXCCXNPXACXTGC

SEQ ID NO: 6817 - protein, 17 aa, Artificial Sequence
  Synthetically generated peptide
  VARIANT (1)..(17): Xaa = Any Amino Acid
CCEFXCCXNPXACTXGC

SEQ ID NO: 6818 - protein, 17 aa, Artificial Sequence
  Synthetically generated peptide
  VARIANT (1)..(17): Xaa = Any Amino Acid
CCEFXCCXNPXACTGXC

SEQ ID NO: 6819 - protein, 16 aa, Artificial Sequence
  Synthetically generated peptide
  VARIANT (1)..(16): Xaa = Any Amino Acid
CCEFXCCXNPAXCTGC

SEQ ID NO: 6820 - protein, 17 aa, Artificial Sequence
  Synthetically generated peptide
  VARIANT (1)..(17): Xaa = Any Amino Acid
CCEFXCCXNPAXXCTGC

SEQ ID NO: 6821 - protein, 17 aa, Artificial Sequence
  Synthetically generated peptide
  VARIANT (1)..(17): Xaa = Any Amino Acid
CCEFXCCXNPAXCXTGC

SEQ ID NO: 6822 - protein, 17 aa, Artificial Sequence
  Synthetically generated peptide
  VARIANT (1)..(17): Xaa = Any Amino Acid
CCEFXCCXNPAXCTXGC

SEQ ID NO: 6823 - protein, 17 aa, Artificial Sequence
  Synthetically generated peptide
  VARIANT (1)..(17): Xaa = Any Amino Acid
CCEFXCCXNPAXCTGXC

SEQ ID NO: 6824 - protein, 16 aa, Artificial Sequence
  Synthetically generated peptide
  VARIANT (1)..(16): Xaa = Any Amino Acid
CCEFXCCXNPACXTGC

SEQ ID NO: 6825 - protein, 17 aa, Artificial Sequence
  Synthetically generated peptide
  VARIANT (1)..(17): Xaa = Any Amino Acid
CCEFXCCXNPACXXTGC

SEQ ID NO: 6826 - protein, 17 aa, Artificial Sequence
  Synthetically generated peptide
  VARIANT (1)..(17): Xaa = Any Amino Acid
CCEFXCCXNPACXTXGC

SEQ ID NO: 6827 - protein, 17 aa, Artificial Sequence
  Synthetically generated peptide
  VARIANT (1)..(17): Xaa = Any Amino Acid
CCEFXCCXNPACXTGXC

SEQ ID NO: 6828 - protein, 16 aa, Artificial Sequence
  Synthetically generated peptide
  VARIANT (1)..(16): Xaa = Any Amino Acid
CCEFXCCXNPACTXGC

SEQ ID NO: 6829 - protein, 17 aa, Artificial Sequence
  Synthetically generated peptide
  VARIANT (1)..(17): Xaa = Any Amino Acid
CCEFXCCXNPACTXXGC

SEQ ID NO: 6830 - protein, 17 aa, Artificial Sequence
  Synthetically generated peptide
  VARIANT (1)..(17): Xaa = Any Amino Acid
CCEFXCCXNPACTXGXC

SEQ ID NO: 6831 - protein, 16 aa, Artificial Sequence
  Synthetically generated peptide
  VARIANT (1)..(16): Xaa = Any Amino Acid
CCEFXCCXNPACTGXC

SEQ ID NO: 6832 - protein, 17 aa, Artificial Sequence
  Synthetically generated peptide
  VARIANT (1)..(17): Xaa = Any Amino Acid
CCEFXCCXNPACTGXXC

SEQ ID NO: 6833 - protein, 15 aa, Artificial Sequence
  Synthetically generated peptide
  VARIANT (1)..(15): Xaa = Any Amino Acid
CCEFXCCNXPACTGC

SEQ ID NO: 6834 - protein, 16 aa, Artificial Sequence
  Synthetically generated peptide
  VARIANT (1)..(16): Xaa = Any Amino Acid
CCEFXCCNXXPACTGC

SEQ ID NO: 6835 - protein, 17 aa, Artificial Sequence
  Synthetically generated peptide
  VARIANT (1)..(17): Xaa = Any Amino Acid
CCEFXCCNXXXPACTGC

SEQ ID NO: 6836 - protein, 17 aa, Artificial Sequence
  Synthetically generated peptide
  VARIANT (1)..(17): Xaa = Any Amino Acid
CCEFXCCNXXPXACTGC

SEQ ID NO: 6837 - protein, 17 aa, Artificial Sequence
  Synthetically generated peptide
  VARIANT (1)..(17): Xaa = Any Amino Acid
CCEFXCCNXXPAXCTGC

SEQ ID NO: 6838 - protein, 17 aa, Artificial Sequence
  Synthetically generated peptide
  VARIANT (1)..(17): Xaa = Any Amino Acid
CCEFXCCNXXPACXTGC

SEQ ID NO: 6839 - protein, 17 aa, Artificial Sequence
  Synthetically generated peptide
  VARIANT (1)..(17): Xaa = Any Amino Acid
CCEFXCCNXXPACTXGC

SEQ ID NO: 6840 - protein, 17 aa, Artificial Sequence
  Synthetically generated peptide
  VARIANT (1)..(17): Xaa = Any Amino Acid
CCEFXCCNXXPACTGXC

SEQ ID NO: 6841 - protein, 16 aa, Artificial Sequence
  Synthetically generated peptide
  VARIANT (1)..(16): Xaa = Any Amino Acid
CCEFXCCNXPXACTGC

SEQ ID NO: 6842 - protein, 17 aa, Artificial Sequence
  Synthetically generated peptide
  VARIANT (1)..(17): Xaa = Any Amino Acid
CCEFXCCNXPXXACTGC

SEQ ID NO: 6843 - protein, 17 aa, Artificial Sequence
  Synthetically generated peptide
  VARIANT (1)..(17): Xaa = Any Amino Acid
CCEFXCCNXPXAXCTGC

SEQ ID NO: 6844 - protein, 17 aa, Artificial Sequence
  Synthetically generated peptide
  VARIANT (1)..(17): Xaa = Any Amino Acid
CCEFXCCNXPXACXTGC

SEQ ID NO: 6845 - protein, 17 aa, Artificial Sequence
  Synthetically generated peptide
  VARIANT (1)..(17): Xaa = Any Amino Acid
CCEFXCCNXPXACTXGC

SEQ ID NO: 6846 - protein, 17 aa, Artificial Sequence
  Synthetically generated peptide
  VARIANT (1)..(17): Xaa = Any Amino Acid
CCEFXCCNXPXACTGXC

SEQ ID NO: 6847 - protein, 16 aa, Artificial Sequence
  Synthetically generated peptide
  VARIANT (1)..(16): Xaa = Any Amino Acid
CCEFXCCNXPAXCTGC

SEQ ID NO: 6848 - protein, 17 aa, Artificial Sequence
  Synthetically generated peptide
  VARIANT (1)..(17): Xaa = Any Amino Acid
CCEFXCCNXPAXXCTGC

SEQ ID NO: 6849 - protein, 17 aa, Artificial Sequence
  Synthetically generated peptide
  VARIANT (1)..(17): Xaa = Any Amino Acid
CCEFXCCNXPAXCXTGC

SEQ ID NO: 6850 - protein, 17 aa, Artificial Sequence
  Synthetically generated peptide
  VARIANT (1)..(17): Xaa = Any Amino Acid
CCEFXCCNXPAXCTXGC

SEQ ID NO: 6851 - protein, 17 aa, Artificial Sequence
  Synthetically generated peptide
  VARIANT (1)..(17): Xaa = Any Amino Acid
CCEFXCCNXPAXCTGXC

SEQ ID NO: 6852 - protein, 16 aa, Artificial Sequence
  Synthetically generated peptide
  VARIANT (1)..(16): Xaa = Any Amino Acid
CCEFXCCNXPACXTGC

SEQ ID NO: 6853 - protein, 17 aa, Artificial Sequence
  Synthetically generated peptide
  VARIANT (1)..(17): Xaa = Any Amino Acid
CCEFXCCNXPACXXTGC

SEQ ID NO: 6854 - protein, 17 aa, Artificial Sequence
  Synthetically generated peptide
  VARIANT (1)..(17): Xaa = Any Amino Acid
CCEFXCCNXPACXTXGC

SEQ ID NO: 6855 - protein, 17 aa, Artificial Sequence
  Synthetically generated peptide
  VARIANT (1)..(17): Xaa = Any Amino Acid
CCEFXCCNXPACXTGXC

SEQ ID NO: 6856 - protein, 16 aa, Artificial Sequence
  Synthetically generated peptide
  VARIANT (1)..(16): Xaa = Any Amino Acid
CCEFXCCNXPACTXGC

SEQ ID NO: 6857 - protein, 17 aa, Artificial Sequence
  Synthetically generated peptide
  VARIANT (1)..(17): Xaa = Any Amino Acid
CCEFXCCNXPACTXXGC

SEQ ID NO: 6858 - protein, 17 aa, Artificial Sequence
  Synthetically generated peptide
  VARIANT (1)..(17): Xaa = Any Amino Acid
CCEFXCCNXPACTXGXC

SEQ ID NO: 6859 - protein, 16 aa, Artificial Sequence
  Synthetically generated peptide
  VARIANT (1)..(16): Xaa = Any Amino Acid
CCEFXCCNXPACTGXC

SEQ ID NO: 6860 - protein, 17 aa, Artificial Sequence
  Synthetically generated peptide
  VARIANT (1)..(17): Xaa = Any Amino Acid
CCEFXCCNXPACTGXXC

SEQ ID NO: 6861 - protein, 15 aa, Artificial Sequence
  Synthetically generated peptide
  VARIANT (1)..(15): Xaa = Any Amino Acid
CCEFXCCNPXACTGC

SEQ ID NO: 6862 - protein, 16 aa, Artificial Sequence
  Synthetically generated peptide
  VARIANT (1)..(16): Xaa = Any Amino Acid
CCEFXCCNPXXACTGC

SEQ ID NO: 6863 - protein, 17 aa, Artificial Sequence
  Synthetically generated peptide
  VARIANT (1)..(17): Xaa = Any Amino Acid
CCEFXCCNPXXXACTGC

SEQ ID NO: 6864 - protein, 17 aa, Artificial Sequence
  Synthetically generated peptide
  VARIANT (1)..(17): Xaa = Any Amino Acid
CCEFXCCNPXXAXCTGC

SEQ ID NO: 6865 - protein, 17 aa, Artificial Sequence
  Synthetically generated peptide
  VARIANT (1)..(17): Xaa = Any Amino Acid
CCEFXCCNPXXACXTGC

SEQ ID NO: 6866 - protein, 17 aa, Artificial Sequence
  Synthetically generated peptide
  VARIANT (1)..(17): Xaa = Any Amino Acid
CCEFXCCNPXXACTXGC

SEQ ID NO: 6867 - protein, 17 aa, Artificial Sequence
  Synthetically generated peptide
  VARIANT (1)..(17): Xaa = Any Amino Acid
CCEFXCCNPXXACTGXC

SEQ ID NO: 6868 - protein, 16 aa, Artificial Sequence
  Synthetically generated peptide
  VARIANT (1)..(16): Xaa = Any Amino Acid
CCEFXCCNPXAXCTGC

SEQ ID NO: 6869 - protein, 17 aa, Artificial Sequence
  Synthetically generated peptide
  VARIANT (1)..(17): Xaa = Any Amino Acid
CCEFXCCNPXAXXCTGC

SEQ ID NO: 6870 - protein, 17 aa, Artificial Sequence
  Synthetically generated peptide
  VARIANT (1)..(17): Xaa = Any Amino Acid
CCEFXCCNPXAXCXTGC

SEQ ID NO: 6871 - protein, 17 aa, Artificial Sequence
  Synthetically generated peptide
  VARIANT (1)..(17): Xaa = Any Amino Acid
CCEFXCCNPXAXCTXGC

SEQ ID NO: 6872 - protein, 17 aa, Artificial Sequence
  Synthetically generated peptide
  VARIANT (1)..(17): Xaa = Any Amino Acid
CCEFXCCNPXAXCTGXC

SEQ ID NO: 6873 - protein, 16 aa, Artificial Sequence
  Synthetically generated peptide
  VARIANT (1)..(16): Xaa = Any Amino Acid
CCEFXCCNPXACXTGC

SEQ ID NO: 6874 - protein, 17 aa, Artificial Sequence
  Synthetically generated peptide
  VARIANT (1)..(17): Xaa = Any Amino Acid
CCEFXCCNPXACXXTGC

SEQ ID NO: 6875 - protein, 17 aa, Artificial Sequence
  Synthetically generated peptide
  VARIANT (1)..(17): Xaa = Any Amino Acid
CCEFXCCNPXACXTXGC

SEQ ID NO: 6876 - protein, 17 aa, Artificial Sequence
  Synthetically generated peptide
  VARIANT (1)..(17): Xaa = Any Amino Acid
CCEFXCCNPXACXTGXC

SEQ ID NO: 6877 - protein, 16 aa, Artificial Sequence
  Synthetically generated peptide
  VARIANT (1)..(16): Xaa = Any Amino Acid
CCEFXCCNPXACTXGC

SEQ ID NO: 6878 - protein, 17 aa, Artificial Sequence
  Synthetically generated peptide
  VARIANT (1)..(17): Xaa = Any Amino Acid
CCEFXCCNPXACTXXGC

SEQ ID NO: 6879 - protein, 17 aa, Artificial Sequence
  Synthetically generated peptide
  VARIANT (1)..(17): Xaa = Any Amino Acid
CCEFXCCNPXACTXGXC

SEQ ID NO: 6880 - protein, 16 aa, Artificial Sequence
  Synthetically generated peptide
  VARIANT (1)..(16): Xaa = Any Amino Acid
CCEFXCCNPXACTGXC

SEQ ID NO: 6881 - protein, 17 aa, Artificial Sequence
  Synthetically generated peptide
  VARIANT (1)..(17): Xaa = Any Amino Acid
CCEFXCCNPXACTGXXC

SEQ ID NO: 6882 - protein, 15 aa, Artificial Sequence
  Synthetically generated peptide
  VARIANT (1)..(15): Xaa = Any Amino Acid
CCEFXCCNPAXCTGC

SEQ ID NO: 6883 - protein, 16 aa, Artificial Sequence
  Synthetically generated peptide
  VARIANT (1)..(16): Xaa = Any Amino Acid
CCEFXCCNPAXXCTGC

SEQ ID NO: 6884 - protein, 17 aa, Artificial Sequence
  Synthetically generated peptide
  VARIANT (1)..(17): Xaa = Any Amino Acid
CCEFXCCNPAXXXCTGC

SEQ ID NO: 6885 - protein, 17 aa, Artificial Sequence
  Synthetically generated peptide
  VARIANT (1)..(17): Xaa = Any Amino Acid
CCEFXCCNPAXXCXTGC

SEQ ID NO: 6886 - protein, 17 aa, Artificial Sequence
  Synthetically generated peptide
  VARIANT (1)..(17): Xaa = Any Amino Acid
CCEFXCCNPAXXCTXGC

SEQ ID NO: 6887 - protein, 17 aa, Artificial Sequence
  Synthetically generated peptide
  VARIANT (1)..(17): Xaa = Any Amino Acid
CCEFXCCNPAXXCTGXC

SEQ ID NO: 6888 - protein, 16 aa, Artificial Sequence
  Synthetically generated peptide
  VARIANT (1)..(16): Xaa = Any Amino Acid
CCEFXCCNPAXCXTGC

SEQ ID NO: 6889 - protein, 17 aa, Artificial Sequence
  Synthetically generated peptide
  VARIANT (1)..(17): Xaa = Any Amino Acid
CCEFXCCNPAXCXXTGC

SEQ ID NO: 6890 - protein, 17 aa, Artificial Sequence
  Synthetically generated peptide
  VARIANT (1)..(17): Xaa = Any Amino Acid
CCEFXCCNPAXCXTXGC

SEQ ID NO: 6891 - protein, 17 aa, Artificial Sequence
  Synthetically generated peptide
  VARIANT (1)..(17): Xaa = Any Amino Acid
CCEFXCCNPAXCXTGXC

SEQ ID NO: 6892 - protein, 16 aa, Artificial Sequence
  Synthetically generated peptide
  VARIANT (1)..(16): Xaa = Any Amino Acid
CCEFXCCNPAXCTXGC

SEQ ID NO: 6893 - protein, 17 aa, Artificial Sequence
  Synthetically generated peptide
  VARIANT (1)..(17): Xaa = Any Amino Acid
CCEFXCCNPAXCTXXGC

SEQ ID NO: 6894 - protein, 17 aa, Artificial Sequence
  Synthetically generated peptide
  VARIANT (1)..(17): Xaa = Any Amino Acid
CCEFXCCNPAXCTXGXC

SEQ ID NO: 6895 - protein, 16 aa, Artificial Sequence
  Synthetically generated peptide
  VARIANT (1)..(16): Xaa = Any Amino Acid
CCEFXCCNPAXCTGXC

SEQ ID NO: 6896 - protein, 17 aa, Artificial Sequence
  Synthetically generated peptide
  VARIANT (1)..(17): Xaa = Any Amino Acid
CCEFXCCNPAXCTGXXC

SEQ ID NO: 6897 - protein, 15 aa, Artificial Sequence
  Synthetically generated peptide
  VARIANT (1)..(15): Xaa = Any Amino Acid
CCEFXCCNPACXTGC

SEQ ID NO: 6898 - protein, 16 aa, Artificial Sequence
  Synthetically generated peptide
  VARIANT (1)..(16): Xaa = Any Amino Acid
CCEFXCCNPACXXTGC

SEQ ID NO: 6899 - protein, 17 aa, Artificial Sequence
  Synthetically generated peptide
  VARIANT (1)..(17): Xaa = Any Amino Acid
CCEFXCCNPACXXXTGC

SEQ ID NO: 6900 - protein, 17 aa, Artificial Sequence
  Synthetically generated peptide
  VARIANT (1)..(17): Xaa = Any Amino Acid
CCEFXCCNPACXXTXGC

SEQ ID NO: 6901 - protein, 17 aa, Artificial Sequence
  Synthetically generated peptide
  VARIANT (1)..(17): Xaa = Any Amino Acid
CCEFXCCNPACXXTGXC

SEQ ID NO: 6902 - protein, 16 aa, Artificial Sequence
  Synthetically generated peptide
  VARIANT (1)..(16): Xaa = Any Amino Acid
CCEFXCCNPACXTXGC

SEQ ID NO: 6903 - protein, 17 aa, Artificial Sequence
  Synthetically generated peptide
  VARIANT (1)..(17): Xaa = Any Amino Acid
CCEFXCCNPACXTXXGC

SEQ ID NO: 6904 - protein, 17 aa, Artificial Sequence
  Synthetically generated peptide
  VARIANT (1)..(17): Xaa = Any Amino Acid
CCEFXCCNPACXTXGXC

SEQ ID NO: 6905 - protein, 16 aa, Artificial Sequence
  Synthetically generated peptide
  VARIANT (1)..(16): Xaa = Any Amino Acid
CCEFXCCNPACXTGXC

SEQ ID NO: 6906 - protein, 17 aa, Artificial Sequence
  Synthetically generated peptide
  VARIANT (1)..(17): Xaa = Any Amino Acid
CCEFXCCNPACXTGXXC

SEQ ID NO: 6907 - protein, 15 aa, Artificial Sequence
  Synthetically generated peptide
  VARIANT (1)..(15): Xaa = Any Amino Acid
CCEFXCCNPACTXGC

SEQ ID NO: 6908 - protein, 16 aa, Artificial Sequence
  Synthetically generated peptide
  VARIANT (1)..(16): Xaa = Any Amino Acid
CCEFXCCNPACTXXGC

SEQ ID NO: 6909 - protein, 17 aa, Artificial Sequence
  Synthetically generated peptide
  VARIANT (1)..(17): Xaa = Any Amino Acid
CCEFXCCNPACTXXXGC

SEQ ID NO: 6910 - protein, 17 aa, Artificial Sequence
  Synthetically generated peptide
  VARIANT (1)..(17): Xaa = Any Amino Acid
CCEFXCCNPACTXXGXC

SEQ ID NO: 6911 - protein, 16 aa, Artificial Sequence
  Synthetically generated peptide
  VARIANT (1)..(16): Xaa = Any Amino Acid
CCEFXCCNPACTXGXC

SEQ ID NO: 6912 - protein, 17 aa, Artificial Sequence
  Synthetically generated peptide
  VARIANT (1)..(17): Xaa = Any Amino Acid
CCEFXCCNPACTXGXXC

SEQ ID NO: 6913 - protein, 15 aa, Artificial Sequence
  Synthetically generated peptide
  VARIANT (1)..(15): Xaa = Any Amino Acid
CCEFXCCNPACTGXC

SEQ ID NO: 6914 - protein, 16 aa, Artificial Sequence
  Synthetically generated peptide
  VARIANT (1)..(16): Xaa = Any Amino Acid
CCEFXCCNPACTGXXC

SEQ ID NO: 6915 - protein, 17 aa, Artificial Sequence
  Synthetically generated peptide
  VARIANT (1)..(17): Xaa = Any Amino Acid
CCEFXCCNPACTGXXXC

SEQ ID NO: 6916 - protein, 14 aa, Artificial Sequence
  Synthetically generated peptide
  VARIANT (1)..(14): Xaa = Any Amino Acid
CCEFCCXNPACTGC

SEQ ID NO: 6917 - protein, 15 aa, Artificial Sequence
  Synthetically generated peptide
  VARIANT (1)..(15): Xaa = Any Amino Acid
CCEFCCXXNPACTGC

SEQ ID NO: 6918 - protein, 16 aa, Artificial Sequence
  Synthetically generated peptide
  VARIANT (1)..(16): Xaa = Any Amino Acid
CCEFCCXXXNPACTGC

SEQ ID NO: 6919 - protein, 17 aa, Artificial Sequence
  Synthetically generated peptide
  VARIANT (1)..(17): Xaa = Any Amino Acid
CCEFCCXXXXNPACTGC

SEQ ID NO: 6920 - protein, 17 aa, Artificial Sequence
  Synthetically generated peptide
  VARIANT (1)..(17): Xaa = Any Amino Acid
CCEFCCXXXNXPACTGC

SEQ ID NO: 6921 - protein, 17 aa, Artificial Sequence
  Synthetically generated peptide
  VARIANT (1)..(17): Xaa = Any Amino Acid
CCEFCCXXXNPXACTGC

SEQ ID NO: 6922 - protein, 17 aa, Artificial Sequence
  Synthetically generated peptide
  VARIANT (1)..(17): Xaa = Any Amino Acid
CCEFCCXXXNPAXCTGC

SEQ ID NO: 6923 - protein, 17 aa, Artificial Sequence
  Synthetically generated peptide
  VARIANT (1)..(17): Xaa = Any Amino Acid
CCEFCCXXXNPACXTGC

SEQ ID NO: 6924 - protein, 17 aa, Artificial Sequence
  Synthetically generated peptide
  VARIANT (1)..(17): Xaa = Any Amino Acid
CCEFCCXXXNPACTXGC

SEQ ID NO: 6925 - protein, 17 aa, Artificial Sequence
  Synthetically generated peptide
  VARIANT (1)..(17): Xaa = Any Amino Acid
CCEFCCXXXNPACTGXC

SEQ ID NO: 6926 - protein, 16 aa, Artificial Sequence
  Synthetically generated peptide
  VARIANT (1)..(16): Xaa = Any Amino Acid
CCEFCCXXNXPACTGC

SEQ ID NO: 6927 - protein, 17 aa, Artificial Sequence
  Synthetically generated peptide
  VARIANT (1)..(17): Xaa = Any Amino Acid
CCEFCCXXNXXPACTGC

SEQ ID NO: 6928 - protein, 17 aa, Artificial Sequence
  Synthetically generated peptide
  VARIANT (1)..(17): Xaa = Any Amino Acid
CCEFCCXXNXPXACTGC

SEQ ID NO: 6929 - protein, 17 aa, Artificial Sequence
  Synthetically generated peptide
  VARIANT (1)..(17): Xaa = Any Amino Acid
CCEFCCXXNXPAXCTGC

SEQ ID NO: 6930 - protein, 17 aa, Artificial Sequence
  Synthetically generated peptide
  VARIANT (1)..(17): Xaa = Any Amino Acid
CCEFCCXXNXPACXTGC

SEQ ID NO: 6931 - protein, 17 aa, Artificial Sequence
  Synthetically generated peptide
  VARIANT (1)..(17): Xaa = Any Amino Acid
CCEFCCXXNXPACTXGC

SEQ ID NO: 6932 - protein, 17 aa, Artificial Sequence
  Synthetically generated peptide
  VARIANT (1)..(17): Xaa = Any Amino Acid
CCEFCCXXNXPACTGXC

SEQ ID NO: 6933 - protein, 16 aa, Artificial Sequence
  Synthetically generated peptide
  VARIANT (1)..(16): Xaa = Any Amino Acid
CCEFCCXXNPXACTGC

SEQ ID NO: 6934 - protein, 17 aa, Artificial Sequence
  Synthetically generated peptide
  VARIANT (1)..(17): Xaa = Any Amino Acid
CCEFCCXXNPXXACTGC

SEQ ID NO: 6935 - protein, 17 aa, Artificial Sequence
  Synthetically generated peptide
  VARIANT (1)..(17): Xaa = Any Amino Acid
CCEFCCXXNPXAXCTGC

SEQ ID NO: 6936 - protein, 17 aa, Artificial Sequence
  Synthetically generated peptide
  VARIANT (1)..(17): Xaa = Any Amino Acid
CCEFCCXXNPXACXTGC

SEQ ID NO: 6937 - protein, 17 aa, Artificial Sequence
  Synthetically generated peptide
  VARIANT (1)..(17): Xaa = Any Amino Acid
CCEFCCXXNPXACTXGC

SEQ ID NO: 6938 - protein, 17 aa, Artificial Sequence
  Synthetically generated peptide
  VARIANT (1)..(17): Xaa = Any Amino Acid
CCEFCCXXNPXACTGXC

SEQ ID NO: 6939 - protein, 16 aa, Artificial Sequence
  Synthetically generated peptide
  VARIANT (1)..(16): Xaa = Any Amino Acid
CCEFCCXXNPAXCTGC

SEQ ID NO: 6940 - protein, 17 aa, Artificial Sequence
  Synthetically generated peptide
  VARIANT (1)..(17): Xaa = Any Amino Acid
CCEFCCXXNPAXXCTGC

SEQ ID NO: 6941 - protein, 17 aa, Artificial Sequence
  Synthetically generated peptide
  VARIANT (1)..(17): Xaa = Any Amino Acid
CCEFCCXXNPAXCXTGC

SEQ ID NO: 6942 - protein, 17 aa, Artificial Sequence
  Synthetically generated peptide
  VARIANT (1)..(17): Xaa = Any Amino Acid
CCEFCCXXNPAXCTXGC

SEQ ID NO: 6943 - protein, 17 aa, Artificial Sequence
  Synthetically generated peptide
  VARIANT (1)..(17): Xaa = Any Amino Acid
CCEFCCXXNPAXCTGXC

SEQ ID NO: 6944 - protein, 16 aa, Artificial Sequence
  Synthetically generated peptide
  VARIANT (1)..(16): Xaa = Any Amino Acid
CCEFCCXXNPACXTGC

SEQ ID NO: 6945 - protein, 17 aa, Artificial Sequence
  Synthetically generated peptide
  VARIANT (1)..(17): Xaa = Any Amino Acid
CCEFCCXXNPACXXTGC

SEQ ID NO: 6946 - protein, 17 aa, Artificial Sequence
  Synthetically generated peptide
  VARIANT (1)..(17): Xaa = Any Amino Acid
CCEFCCXXNPACXTXGC

SEQ ID NO: 6947 - protein, 17 aa, Artificial Sequence
  Synthetically generated peptide
  VARIANT (1)..(17): Xaa = Any Amino Acid
CCEFCCXXNPACXTGXC

SEQ ID NO: 6948 - protein, 16 aa, Artificial Sequence
  Synthetically generated peptide
  VARIANT (1)..(16): Xaa = Any Amino Acid
CCEFCCXXNPACTXGC

SEQ ID NO: 6949 - protein, 17 aa, Artificial Sequence
  Synthetically generated peptide
  VARIANT (1)..(17): Xaa = Any Amino Acid
CCEFCCXXNPACTXXGC

SEQ ID NO: 6950 - protein, 17 aa, Artificial Sequence
  Synthetically generated peptide
  VARIANT (1)..(17): Xaa = Any Amino Acid
CCEFCCXXNPACTXGXC

SEQ ID NO: 6951 - protein, 16 aa, Artificial Sequence
  Synthetically generated peptide
  VARIANT (1)..(16): Xaa = Any Amino Acid
CCEFCCXXNPACTGXC

SEQ ID NO: 6952 - protein, 17 aa, Artificial Sequence
  Synthetically generated peptide
  VARIANT (1)..(17): Xaa = Any Amino Acid
CCEFCCXXNPACTGXXC

SEQ ID NO: 6953 - protein, 15 aa, Artificial Sequence
  Synthetically generated peptide
  VARIANT (1)..(15): Xaa = Any Amino Acid
CCEFCCXNXPACTGC

SEQ ID NO: 6954 - protein, 16 aa, Artificial Sequence
  Synthetically generated peptide
  VARIANT (1)..(16): Xaa = Any Amino Acid
CCEFCCXNXXPACTGC

SEQ ID NO: 6955 - protein, 17 aa, Artificial Sequence
  Synthetically generated peptide
  VARIANT (1)..(17): Xaa = Any Amino Acid
CCEFCCXNXXXPACTGC

SEQ ID NO: 6956 - protein, 17 aa, Artificial Sequence
  Synthetically generated peptide
  VARIANT (1)..(17): Xaa = Any Amino Acid
CCEFCCXNXXPXACTGC

SEQ ID NO: 6957 - protein, 17 aa, Artificial Sequence
  Synthetically generated peptide
  VARIANT (1)..(17): Xaa = Any Amino Acid
CCEFCCXNXXPAXCTGC

SEQ ID NO: 6958 - protein, 17 aa, Artificial Sequence
  Synthetically generated peptide
  VARIANT (1)..(17): Xaa = Any Amino Acid
CCEFCCXNXXPACXTGC

SEQ ID NO: 6959 - protein, 17 aa, Artificial Sequence
  Synthetically generated peptide
  VARIANT (1)..(17): Xaa = Any Amino Acid
CCEFCCXNXXPACTXGC

SEQ ID NO: 6960 - protein, 17 aa, Artificial Sequence
  Synthetically generated peptide
  VARIANT (1)..(17): Xaa = Any Amino Acid
CCEFCCXNXXPACTGXC

SEQ ID NO: 6961 - protein, 16 aa, Artificial Sequence
  Synthetically generated peptide
  VARIANT (1)..(16): Xaa = Any Amino Acid
CCEFCCXNXPXACTGC

SEQ ID NO: 6962 - protein, 17 aa, Artificial Sequence
  Synthetically generated peptide
  VARIANT (1)..(17): Xaa = Any Amino Acid
CCEFCCXNXPXXACTGC

SEQ ID NO: 6963 - protein, 17 aa, Artificial Sequence
  Synthetically generated peptide
  VARIANT (1)..(17): Xaa = Any Amino Acid
CCEFCCXNXPXAXCTGC

SEQ ID NO: 6964 - protein, 17 aa, Artificial Sequence
  Synthetically generated peptide
  VARIANT (1)..(17): Xaa = Any Amino Acid
CCEFCCXNXPXACXTGC

SEQ ID NO: 6965 - protein, 17 aa, Artificial Sequence
  Synthetically generated peptide
  VARIANT (1)..(17): Xaa = Any Amino Acid
CCEFCCXNXPXACTXGC

SEQ ID NO: 6966 - protein, 17 aa, Artificial Sequence
  Synthetically generated peptide
  VARIANT (1)..(17): Xaa = Any Amino Acid
CCEFCCXNXPXACTGXC

SEQ ID NO: 6967 - protein, 16 aa, Artificial Sequence
  Synthetically generated peptide
  VARIANT (1)..(16): Xaa = Any Amino Acid
CCEFCCXNXPAXCTGC

SEQ ID NO: 6968 - protein, 17 aa, Artificial Sequence
  Synthetically generated peptide
  VARIANT (1)..(17): Xaa = Any Amino Acid
CCEFCCXNXPAXXCTGC

SEQ ID NO: 6969 - protein, 17 aa, Artificial Sequence
  Synthetically generated peptide
  VARIANT (1)..(17): Xaa = Any Amino Acid
CCEFCCXNXPAXCXTGC

SEQ ID NO: 6970 - protein, 17 aa, Artificial Sequence
  Synthetically generated peptide
  VARIANT (1)..(17): Xaa = Any Amino Acid
CCEFCCXNXPAXCTXGC

SEQ ID NO: 6971 - protein, 17 aa, Artificial Sequence
  Synthetically generated peptide
  VARIANT (1)..(17): Xaa = Any Amino Acid
CCEFCCXNXPAXCTGXC

SEQ ID NO: 6972 - protein, 16 aa, Artificial Sequence
  Synthetically generated peptide
  VARIANT (1)..(16): Xaa = Any Amino Acid
CCEFCCXNXPACXTGC

SEQ ID NO: 6973 - protein, 17 aa, Artificial Sequence
  Synthetically generated peptide
  VARIANT (1)..(17): Xaa = Any Amino Acid
CCEFCCXNXPACXXTGC

SEQ ID NO: 6974 - protein, 17 aa, Artificial Sequence
  Synthetically generated peptide
  VARIANT (1)..(17): Xaa = Any Amino Acid
CCEFCCXNXPACXTXGC

SEQ ID NO: 6975 - protein, 17 aa, Artificial Sequence
  Synthetically generated peptide
  VARIANT (1)..(17): Xaa = Any Amino Acid
CCEFCCXNXPACXTGXC

SEQ ID NO: 6976 - protein, 16 aa, Artificial Sequence
  Synthetically generated peptide
  VARIANT (1)..(16): Xaa = Any Amino Acid
CCEFCCXNXPACTXGC

SEQ ID NO: 6977 - protein, 17 aa, Artificial Sequence
  Synthetically generated peptide
  VARIANT (1)..(17): Xaa = Any Amino Acid
CCEFCCXNXPACTXXGC

SEQ ID NO: 6978 - protein, 17 aa, Artificial Sequence
  Synthetically generated peptide
  VARIANT (1)..(17): Xaa = Any Amino Acid
CCEFCCXNXPACTXGXC

SEQ ID NO: 6979 - protein, 16 aa, Artificial Sequence
  Synthetically generated peptide
  VARIANT (1)..(16): Xaa = Any Amino Acid
CCEFCCXNXPACTGXC

SEQ ID NO: 6980 - protein, 17 aa, Artificial Sequence
  Synthetically generated peptide
  VARIANT (1)..(17): Xaa = Any Amino Acid
CCEFCCXNXPACTGXXC

SEQ ID NO: 6981 - protein, 15 aa, Artificial Sequence
  Synthetically generated peptide
  VARIANT (1)..(15): Xaa = Any Amino Acid
CCEFCCXNPXACTGC

SEQ ID NO: 6982 - protein, 16 aa, Artificial Sequence
  Synthetically generated peptide
  VARIANT (1)..(16): Xaa = Any Amino Acid
CCEFCCXNPXXACTGC

SEQ ID NO: 6983 - protein, 17 aa, Artificial Sequence
  Synthetically generated peptide
  VARIANT (1)..(17): Xaa = Any Amino Acid
CCEFCCXNPXXXACTGC

SEQ ID NO: 6984 - protein, 17 aa, Artificial Sequence
  Synthetically generated peptide
  VARIANT (1)..(17): Xaa = Any Amino Acid
CCEFCCXNPXXAXCTGC

SEQ ID NO: 6985 - protein, 17 aa, Artificial Sequence
  Synthetically generated peptide
  VARIANT (1)..(17): Xaa = Any Amino Acid
CCEFCCXNPXXACXTGC

SEQ ID NO: 6986 - protein, 17 aa, Artificial Sequence
  Synthetically generated peptide
  VARIANT (1)..(17): Xaa = Any Amino Acid
CCEFCCXNPXXACTXGC

SEQ ID NO: 6987 - protein, 17 aa, Artificial Sequence
  Synthetically generated peptide
  VARIANT (1)..(17): Xaa = Any Amino Acid
CCEFCCXNPXXACTGXC

SEQ ID NO: 6988 - protein, 16 aa, Artificial Sequence
  Synthetically generated peptide
  VARIANT (1)..(16): Xaa = Any Amino Acid
CCEFCCXNPXAXCTGC

SEQ ID NO: 6989 - protein, 17 aa, Artificial Sequence
  Synthetically generated peptide
  VARIANT (1)..(17): Xaa = Any Amino Acid
CCEFCCXNPXAXXCTGC

SEQ ID NO: 6990 - protein, 17 aa, Artificial Sequence
  Synthetically generated peptide
  VARIANT (1)..(17): Xaa = Any Amino Acid
CCEFCCXNPXAXCXTGC

SEQ ID NO: 6991 - protein, 17 aa, Artificial Sequence
  Synthetically generated peptide
  VARIANT (1)..(17): Xaa = Any Amino Acid
CCEFCCXNPXAXCTXGC

SEQ ID NO: 6992 - protein, 17 aa, Artificial Sequence
  Synthetically generated peptide
  VARIANT (1)..(17): Xaa = Any Amino Acid
CCEFCCXNPXAXCTGXC

SEQ ID NO: 6993 - protein, 16 aa, Artificial Sequence
  Synthetically generated peptide
  VARIANT (1)..(16): Xaa = Any Amino Acid
CCEFCCXNPXACXTGC

SEQ ID NO: 6994 - protein, 17 aa, Artificial Sequence
  Synthetically generated peptide
  VARIANT (1)..(17): Xaa = Any Amino Acid
CCEFCCXNPXACXXTGC

SEQ ID NO: 6995 - protein, 17 aa, Artificial Sequence
  Synthetically generated peptide
  VARIANT (1)..(17): Xaa = Any Amino Acid
CCEFCCXNPXACXTXGC

SEQ ID NO: 6996 - protein, 17 aa, Artificial Sequence
  Synthetically generated peptide
  VARIANT (1)..(17): Xaa = Any Amino Acid
CCEFCCXNPXACXTGXC

SEQ ID NO: 6997 - protein, 16 aa, Artificial Sequence
  Synthetically generated peptide
  VARIANT (1)..(16): Xaa = Any Amino Acid
CCEFCCXNPXACTXGC

SEQ ID NO: 6998 - protein, 17 aa, Artificial Sequence
  Synthetically generated peptide
  VARIANT (1)..(17): Xaa = Any Amino Acid
CCEFCCXNPXACTXXGC

SEQ ID NO: 6999 - protein, 17 aa, Artificial Sequence
  Synthetically generated peptide
  VARIANT (1)..(17): Xaa = Any Amino Acid
CCEFCCXNPXACTXGXC

SEQ ID NO: 7000 - protein, 16 aa, Artificial Sequence
  Synthetically generated peptide
  VARIANT (1)..(16): Xaa = Any Amino Acid
CCEFCCXNPXACTGXC

SEQ ID NO: 7001 - protein, 17 aa, Artificial Sequence
  Synthetically generated peptide
  VARIANT (1)..(17): Xaa = Any Amino Acid
CCEFCCXNPXACTGXXC

SEQ ID NO: 7002 - protein, 15 aa, Artificial Sequence
  Synthetically generated peptide
  VARIANT (1)..(15): Xaa = Any Amino Acid
CCEFCCXNPAXCTGC

SEQ ID NO: 7003 - protein, 16 aa, Artificial Sequence
  Synthetically generated peptide
  VARIANT (1)..(16): Xaa = Any Amino Acid
CCEFCCXNPAXXCTGC

SEQ ID NO: 7004 - protein, 17 aa, Artificial Sequence
  Synthetically generated peptide
  VARIANT (1)..(17): Xaa = Any Amino Acid
CCEFCCXNPAXXXCTGC

SEQ ID NO: 7005 - protein, 17 aa, Artificial Sequence
  Synthetically generated peptide
  VARIANT (1)..(17): Xaa = Any Amino Acid
CCEFCCXNPAXXCXTGC

SEQ ID NO: 7006 - protein, 17 aa, Artificial Sequence
  Synthetically generated peptide
  VARIANT (1)..(17): Xaa = Any Amino Acid
CCEFCCXNPAXXCTXGC

SEQ ID NO: 7007 - protein, 17 aa, Artificial Sequence
  Synthetically generated peptide
  VARIANT (1)..(17): Xaa = Any Amino Acid
CCEFCCXNPAXXCTGXC

SEQ ID NO: 7008 - protein, 16 aa, Artificial Sequence
  Synthetically generated peptide
  VARIANT (1)..(16): Xaa = Any Amino Acid
CCEFCCXNPAXCXTGC

SEQ ID NO: 7009 - protein, 17 aa, Artificial Sequence
  Synthetically generated peptide
  VARIANT (1)..(17): Xaa = Any Amino Acid
CCEFCCXNPAXCXXTGC

SEQ ID NO: 7010 - protein, 17 aa, Artificial Sequence
  Synthetically generated peptide
  VARIANT (1)..(17): Xaa = Any Amino Acid
CCEFCCXNPAXCXTXGC

SEQ ID NO: 7011 - protein, 17 aa, Artificial Sequence
  Synthetically generated peptide
  VARIANT (1)..(17): Xaa = Any Amino Acid
CCEFCCXNPAXCXTGXC

SEQ ID NO: 7012 - protein, 16 aa, Artificial Sequence
  Synthetically generated peptide
  VARIANT (1)..(16): Xaa = Any Amino Acid
CCEFCCXNPAXCTXGC

SEQ ID NO: 7013 - protein, 17 aa, Artificial Sequence
  Synthetically generated peptide
  VARIANT (1)..(17): Xaa = Any Amino Acid
CCEFCCXNPAXCTXXGC

SEQ ID NO: 7014 - protein, 17 aa, Artificial Sequence
  Synthetically generated peptide
  VARIANT (1)..(17): Xaa = Any Amino Acid
CCEFCCXNPAXCTXGXC

SEQ ID NO: 7015 - protein, 16 aa, Artificial Sequence
  Synthetically generated peptide
  VARIANT (1)..(16): Xaa = Any Amino Acid
CCEFCCXNPAXCTGXC

SEQ ID NO: 7016 - protein, 17 aa, Artificial Sequence
  Synthetically generated peptide
  VARIANT (1)..(17): Xaa = Any Amino Acid
CCEFCCXNPAXCTGXXC

SEQ ID NO: 7017 - protein, 15 aa, Artificial Sequence
  Synthetically generated peptide
  VARIANT (1)..(15): Xaa = Any Amino Acid
CCEFCCXNPACXTGC

SEQ ID NO: 7018 - protein, 16 aa, Artificial Sequence
  Synthetically generated peptide
  VARIANT (1)..(16): Xaa = Any Amino Acid
CCEFCCXNPACXXTGC

SEQ ID NO: 7019 - protein, 17 aa, Artificial Sequence
  Synthetically generated peptide
  VARIANT (1)..(17): Xaa = Any Amino Acid
CCEFCCXNPACXXXTGC

SEQ ID NO: 7020 - protein, 17 aa, Artificial Sequence
  Synthetically generated peptide
  VARIANT (1)..(17): Xaa = Any Amino Acid
CCEFCCXNPACXXTXGC

SEQ ID NO: 7021 - protein, 17 aa, Artificial Sequence
  Synthetically generated peptide
  VARIANT (1)..(17): Xaa = Any Amino Acid
CCEFCCXNPACXXTGXC

SEQ ID NO: 7022 - protein, 16 aa, Artificial Sequence
  Synthetically generated peptide
  VARIANT (1)..(16): Xaa = Any Amino Acid
CCEFCCXNPACXTXGC

SEQ ID NO: 7023 - protein, 17 aa, Artificial Sequence
  Synthetically generated peptide
  VARIANT (1)..(17): Xaa = Any Amino Acid
CCEFCCXNPACXTXXGC

SEQ ID NO: 7024 - protein, 17 aa, Artificial Sequence
  Synthetically generated peptide
  VARIANT (1)..(17): Xaa = Any Amino Acid
CCEFCCXNPACXTXGXC

SEQ ID NO: 7025 - protein, 16 aa, Artificial Sequence
  Synthetically generated peptide
  VARIANT (1)..(16): Xaa = Any Amino Acid
CCEFCCXNPACXTGXC

SEQ ID NO: 7026 - protein, 17 aa, Artificial Sequence
  Synthetically generated peptide
  VARIANT (1)..(17): Xaa = Any Amino Acid
CCEFCCXNPACXTGXXC

SEQ ID NO: 7027 - protein, 15 aa, Artificial Sequence
  Synthetically generated peptide
  VARIANT (1)..(15): Xaa = Any Amino Acid
CCEFCCXNPACTXGC

SEQ ID NO: 7028 - protein, 16 aa, Artificial Sequence
  Synthetically generated peptide
  VARIANT (1)..(16): Xaa = Any Amino Acid
CCEFCCXNPACTXXGC

SEQ ID NO: 7029 - protein, 17 aa, Artificial Sequence
  Synthetically generated peptide
  VARIANT (1)..(17): Xaa = Any Amino Acid
CCEFCCXNPACTXXXGC

SEQ ID NO: 7030 - protein, 17 aa, Artificial Sequence
  Synthetically generated peptide
  VARIANT (1)..(17): Xaa = Any Amino Acid
CCEFCCXNPACTXXGXC

SEQ ID NO: 7031 - protein, 16 aa, Artificial Sequence
  Synthetically generated peptide
  VARIANT (1)..(16): Xaa = Any Amino Acid
CCEFCCXNPACTXGXC

SEQ ID NO: 7032 - protein, 17 aa, Artificial Sequence
  Synthetically generated peptide
  VARIANT (1)..(17): Xaa = Any Amino Acid
CCEFCCXNPACTXGXXC

SEQ ID NO: 7033 - protein, 15 aa, Artificial Sequence
  Synthetically generated peptide
  VARIANT (1)..(15): Xaa = Any Amino Acid
CCEFCCXNPACTGXC

SEQ ID NO: 7034 - protein, 16 aa, Artificial Sequence
  Synthetically generated peptide
  VARIANT (1)..(16): Xaa = Any Amino Acid
CCEFCCXNPACTGXXC

SEQ ID NO: 7035 - protein, 17 aa, Artificial Sequence
  Synthetically generated peptide
  VARIANT (1)..(17): Xaa = Any Amino Acid
CCEFCCXNPACTGXXXC

SEQ ID NO: 7036 - protein, 14 aa, Artificial Sequence
  Synthetically generated peptide
  VARIANT (1)..(14): Xaa = Any Amino Acid
CCEFCCNXPACTGC

SEQ ID NO: 7037 - protein, 15 aa, Artificial Sequence
  Synthetically generated peptide
  VARIANT (1)..(15): Xaa = Any Amino Acid
CCEFCCNXXPACTGC

SEQ ID NO: 7038 - protein, 16 aa, Artificial Sequence
  Synthetically generated peptide
  VARIANT (1)..(16): Xaa = Any Amino Acid
CCEFCCNXXXPACTGC

SEQ ID NO: 7039 - protein, 17 aa, Artificial Sequence
  Synthetically generated peptide
  VARIANT (1)..(17): Xaa = Any Amino Acid
CCEFCCNXXXXPACTGC

SEQ ID NO: 7040 - protein, 17 aa, Artificial Sequence
  Synthetically generated peptide
  VARIANT (1)..(17): Xaa = Any Amino Acid
CCEFCCNXXXPXACTGC

SEQ ID NO: 7041 - protein, 17 aa, Artificial Sequence
  Synthetically generated peptide
  VARIANT (1)..(17): Xaa = Any Amino Acid
CCEFCCNXXXPAXCTGC

SEQ ID NO: 7042 - protein, 17 aa, Artificial Sequence
  Synthetically generated peptide
  VARIANT (1)..(17): Xaa = Any Amino Acid
CCEFCCNXXXPACXTGC

SEQ ID NO: 7043 - protein, 17 aa, Artificial Sequence
  Synthetically generated peptide
  VARIANT (1)..(17): Xaa = Any Amino Acid
CCEFCCNXXXPACTXGC

SEQ ID NO: 7044 - protein, 17 aa, Artificial Sequence
  Synthetically generated peptide
  VARIANT (1)..(17): Xaa = Any Amino Acid
CCEFCCNXXXPACTGXC

SEQ ID NO: 7045 - protein, 16 aa, Artificial Sequence
  Synthetically generated peptide
  VARIANT (1)..(16): Xaa = Any Amino Acid
CCEFCCNXXPXACTGC

SEQ ID NO: 7046 - protein, 17 aa, Artificial Sequence
  Synthetically generated peptide
  VARIANT (1)..(17): Xaa = Any Amino Acid
CCEFCCNXXPXXACTGC

SEQ ID NO: 7047 - protein, 17 aa, Artificial Sequence
  Synthetically generated peptide
  VARIANT (1)..(17): Xaa = Any Amino Acid
CCEFCCNXXPXAXCTGC

SEQ ID NO: 7048 - protein, 17 aa, Artificial Sequence
  Synthetically generated peptide
  VARIANT (1)..(17): Xaa = Any Amino Acid
CCEFCCNXXPXACXTGC

SEQ ID NO: 7049 - protein, 17 aa, Artificial Sequence
  Synthetically generated peptide
  VARIANT (1)..(17): Xaa = Any Amino Acid
CCEFCCNXXPXACTXGC

SEQ ID NO: 7050 - protein, 17 aa, Artificial Sequence
  Synthetically generated peptide
  VARIANT (1)..(17): Xaa = Any Amino Acid
CCEFCCNXXPXACTGXC

SEQ ID NO: 7051 - protein, 16 aa, Artificial Sequence
  Synthetically generated peptide
  VARIANT (1)..(16): Xaa = Any Amino Acid
CCEFCCNXXPAXCTGC

SEQ ID NO: 7052 - protein, 17 aa, Artificial Sequence
  Synthetically generated peptide
  VARIANT (1)..(17): Xaa = Any Amino Acid
CCEFCCNXXPAXXCTGC

SEQ ID NO: 7053 - protein, 17 aa, Artificial Sequence
  Synthetically generated peptide
  VARIANT (1)..(17): Xaa = Any Amino Acid
CCEFCCNXXPAXCXTGC

SEQ ID NO: 7054 - protein, 17 aa, Artificial Sequence
  Synthetically generated peptide
  VARIANT (1)..(17): Xaa = Any Amino Acid
CCEFCCNXXPAXCTXGC

SEQ ID NO: 7055 - protein, 17 aa, Artificial Sequence
  Synthetically generated peptide
  VARIANT (1)..(17): Xaa = Any Amino Acid
CCEFCCNXXPAXCTGXC

SEQ ID NO: 7056 - protein, 16 aa, Artificial Sequence
  Synthetically generated peptide
  VARIANT (1)..(16): Xaa = Any Amino Acid
CCEFCCNXXPACXTGC

SEQ ID NO: 7057 - protein, 17 aa, Artificial Sequence
  Synthetically generated peptide
  VARIANT (1)..(17): Xaa = Any Amino Acid
CCEFCCNXXPACXXTGC

SEQ ID NO: 7058 - protein, 17 aa, Artificial Sequence
  Synthetically generated peptide
  VARIANT (1)..(17): Xaa = Any Amino Acid
CCEFCCNXXPACXTXGC

SEQ ID NO: 7059 - protein, 17 aa, Artificial Sequence
  Synthetically generated peptide
  VARIANT (1)..(17): Xaa = Any Amino Acid
CCEFCCNXXPACXTGXC

SEQ ID NO: 7060 - protein, 16 aa, Artificial Sequence
  Synthetically generated peptide
  VARIANT (1)..(16): Xaa = Any Amino Acid
CCEFCCNXXPACTXGC

SEQ ID NO: 7061 - protein, 17 aa, Artificial Sequence
  Synthetically generated peptide
  VARIANT (1)..(17): Xaa = Any Amino Acid
CCEFCCNXXPACTXXGC

SEQ ID NO: 7062 - protein, 17 aa, Artificial Sequence
  Synthetically generated peptide
  VARIANT (1)..(17): Xaa = Any Amino Acid
CCEFCCNXXPACTXGXC

SEQ ID NO: 7063 - protein, 16 aa, Artificial Sequence
  Synthetically generated peptide
  VARIANT (1)..(16): Xaa = Any Amino Acid
CCEFCCNXXPACTGXC

SEQ ID NO: 7064 - protein, 17 aa, Artificial Sequence
  Synthetically generated peptide
  VARIANT (1)..(17): Xaa = Any Amino Acid
CCEFCCNXXPACTGXXC

SEQ ID NO: 7065 - protein, 15 aa, Artificial Sequence
  Synthetically generated peptide
  VARIANT (1)..(15): Xaa = Any Amino Acid
CCEFCCNXPXACTGC

SEQ ID NO: 7066 - protein, 16 aa, Artificial Sequence
  Synthetically generated peptide
  VARIANT (1)..(16): Xaa = Any Amino Acid
CCEFCCNXPXXACTGC

SEQ ID NO: 7067 - protein, 17 aa, Artificial Sequence
  Synthetically generated peptide
  VARIANT (1)..(17): Xaa = Any Amino Acid
CCEFCCNXPXXXACTGC

SEQ ID NO: 7068 - protein, 17 aa, Artificial Sequence
  Synthetically generated peptide
  VARIANT (1)..(17): Xaa = Any Amino Acid
CCEFCCNXPXXAXCTGC

SEQ ID NO: 7069 - protein, 17 aa, Artificial Sequence
  Synthetically generated peptide
  VARIANT (1)..(17): Xaa = Any Amino Acid
CCEFCCNXPXXACXTGC

SEQ ID NO: 7070 - protein, 17 aa, Artificial Sequence
  Synthetically generated peptide
  VARIANT (1)..(17): Xaa = Any Amino Acid
CCEFCCNXPXXACTXGC

SEQ ID NO: 7071 - protein, 17 aa, Artificial Sequence
  Synthetically generated peptide
  VARIANT (1)..(17): Xaa = Any Amino Acid
CCEFCCNXPXXACTGXC

SEQ ID NO: 7072 - protein, 16 aa, Artificial Sequence
  Synthetically generated peptide
  VARIANT (1)..(16): Xaa = Any Amino Acid
CCEFCCNXPXAXCTGC

SEQ ID NO: 7073 - protein, 17 aa, Artificial Sequence
  Synthetically generated peptide
  VARIANT (1)..(17): Xaa = Any Amino Acid
CCEFCCNXPXAXXCTGC

SEQ ID NO: 7074 - protein, 17 aa, Artificial Sequence
  Synthetically generated peptide
  VARIANT (1)..(17): Xaa = Any Amino Acid
CCEFCCNXPXAXCXTGC

SEQ ID NO: 7075 - protein, 17 aa, Artificial Sequence
  Synthetically generated peptide
  VARIANT (1)..(17): Xaa = Any Amino Acid
CCEFCCNXPXAXCTXGC

SEQ ID NO: 7076 - protein, 17 aa, Artificial Sequence
  Synthetically generated peptide
  VARIANT (1)..(17): Xaa = Any Amino Acid
CCEFCCNXPXAXCTGXC

SEQ ID NO: 7077 - protein, 16 aa, Artificial Sequence
  Synthetically generated peptide
  VARIANT (1)..(16): Xaa = Any Amino Acid
CCEFCCNXPXACXTGC

SEQ ID NO: 7078 - protein, 17 aa, Artificial Sequence
  Synthetically generated peptide
  VARIANT (1)..(17): Xaa = Any Amino Acid
CCEFCCNXPXACXXTGC

SEQ ID NO: 7079 - protein, 17 aa, Artificial Sequence
  Synthetically generated peptide
  VARIANT (1)..(17): Xaa = Any Amino Acid
CCEFCCNXPXACXTXGC

SEQ ID NO: 7080 - protein, 17 aa, Artificial Sequence
  Synthetically generated peptide
  VARIANT (1)..(17): Xaa = Any Amino Acid
CCEFCCNXPXACXTGXC

SEQ ID NO: 7081 - protein, 16 aa, Artificial Sequence
  Synthetically generated peptide
  VARIANT (1)..(16): Xaa = Any Amino Acid
CCEFCCNXPXACTXGC

SEQ ID NO: 7082 - protein, 17 aa, Artificial Sequence
  Synthetically generated peptide
  VARIANT (1)..(17): Xaa = Any Amino Acid
CCEFCCNXPXACTXXGC

SEQ ID NO: 7083 - protein, 17 aa, Artificial Sequence
  Synthetically generated peptide
  VARIANT (1)..(17): Xaa = Any Amino Acid
CCEFCCNXPXACTXGXC

SEQ ID NO: 7084 - protein, 16 aa, Artificial Sequence
  Synthetically generated peptide
  VARIANT (1)..(16): Xaa = Any Amino Acid
CCEFCCNXPXACTGXC

SEQ ID NO: 7085 - protein, 17 aa, Artificial Sequence
  Synthetically generated peptide
  VARIANT (1)..(17): Xaa = Any Amino Acid
CCEFCCNXPXACTGXXC

SEQ ID NO: 7086 - protein, 15 aa, Artificial Sequence
  Synthetically generated peptide
  VARIANT (1)..(15): Xaa = Any Amino Acid
CCEFCCNXPAXCTGC

SEQ ID NO: 7087 - protein, 16 aa, Artificial Sequence
  Synthetically generated peptide
  VARIANT (1)..(16): Xaa = Any Amino Acid
CCEFCCNXPAXXCTGC

SEQ ID NO: 7088 - protein, 17 aa, Artificial Sequence
  Synthetically generated peptide
  VARIANT (1)..(17): Xaa = Any Amino Acid
CCEFCCNXPAXXXCTGC

SEQ ID NO: 7089 - protein, 17 aa, Artificial Sequence
  Synthetically generated peptide
  VARIANT (1)..(17): Xaa = Any Amino Acid
CCEFCCNXPAXXCXTGC

SEQ ID NO: 7090 - protein, 17 aa, Artificial Sequence
  Synthetically generated peptide
  VARIANT (1)..(17): Xaa = Any Amino Acid
CCEFCCNXPAXXCTXGC

SEQ ID NO: 7091 - protein, 17 aa, Artificial Sequence
  Synthetically generated peptide
  VARIANT (1)..(17): Xaa = Any Amino Acid
CCEFCCNXPAXXCTGXC

SEQ ID NO: 7092 - protein, 16 aa, Artificial Sequence
  Synthetically generated peptide
  VARIANT (1)..(16): Xaa = Any Amino Acid
CCEFCCNXPAXCXTGC

SEQ ID NO: 7093 - protein, 17 aa, Artificial Sequence
  Synthetically generated peptide
  VARIANT (1)..(17): Xaa = Any Amino Acid
CCEFCCNXPAXCXXTGC

SEQ ID NO: 7094 - protein, 17 aa, Artificial Sequence
  Synthetically generated peptide
  VARIANT (1)..(17): Xaa = Any Amino Acid
CCEFCCNXPAXCXTXGC

SEQ ID NO: 7095 - protein, 17 aa, Artificial Sequence
  Synthetically generated peptide
  VARIANT (1)..(17): Xaa = Any Amino Acid
CCEFCCNXPAXCXTGXC

SEQ ID NO: 7096 - protein, 16 aa, Artificial Sequence
  Synthetically generated peptide
  VARIANT (1)..(16): Xaa = Any Amino Acid
CCEFCCNXPAXCTXGC

SEQ ID NO: 7097 - protein, 17 aa, Artificial Sequence
  Synthetically generated peptide
  VARIANT (1)..(17): Xaa = Any Amino Acid
CCEFCCNXPAXCTXXGC

SEQ ID NO: 7098 - protein, 17 aa, Artificial Sequence
  Synthetically generated peptide
  VARIANT (1)..(17): Xaa = Any Amino Acid
CCEFCCNXPAXCTXGXC

SEQ ID NO: 7099 - protein, 16 aa, Artificial Sequence
  Synthetically generated peptide
  VARIANT (1)..(16): Xaa = Any Amino Acid
CCEFCCNXPAXCTGXC

SEQ ID NO: 7100 - protein, 17 aa, Artificial Sequence
  Synthetically generated peptide
  VARIANT (1)..(17): Xaa = Any Amino Acid
CCEFCCNXPAXCTGXXC

SEQ ID NO: 7101 - protein, 15 aa, Artificial Sequence
  Synthetically generated peptide
  VARIANT (1)..(15): Xaa = Any Amino Acid
CCEFCCNXPACXTGC

SEQ ID NO: 7102 - protein, 16 aa, Artificial Sequence
  Synthetically generated peptide
  VARIANT (1)..(16): Xaa = Any Amino Acid
CCEFCCNXPACXXTGC

SEQ ID NO: 7103 - protein, 17 aa, Artificial Sequence
  Synthetically generated peptide
  VARIANT (1)..(17): Xaa = Any Amino Acid
CCEFCCNXPACXXXTGC

SEQ ID NO: 7104 - protein, 17 aa, Artificial Sequence
  Synthetically generated peptide
  VARIANT (1)..(17): Xaa = Any Amino Acid
CCEFCCNXPACXXTXGC

SEQ ID NO: 7105 - protein, 17 aa, Artificial Sequence
  Synthetically generated peptide
  VARIANT (1)..(17): Xaa = Any Amino Acid
CCEFCCNXPACXXTGXC

SEQ ID NO: 7106 - protein, 16 aa, Artificial Sequence
  Synthetically generated peptide
  VARIANT (1)..(16): Xaa = Any Amino Acid
CCEFCCNXPACXTXGC

SEQ ID NO: 7107 - protein, 17 aa, Artificial Sequence
  Synthetically generated peptide
  VARIANT (1)..(17): Xaa = Any Amino Acid
CCEFCCNXPACXTXXGC

SEQ ID NO: 7108 - protein, 17 aa, Artificial Sequence
  Synthetically generated peptide
  VARIANT (1)..(17): Xaa = Any Amino Acid
CCEFCCNXPACXTXGXC

SEQ ID NO: 7109 - protein, 16 aa, Artificial Sequence
  Synthetically generated peptide
  VARIANT (1)..(16): Xaa = Any Amino Acid
CCEFCCNXPACXTGXC

SEQ ID NO: 7110 - protein, 17 aa, Artificial Sequence
  Synthetically generated peptide
  VARIANT (1)..(17): Xaa = Any Amino Acid
CCEFCCNXPACXTGXXC

SEQ ID NO: 7111 - protein, 15 aa, Artificial Sequence
  Synthetically generated peptide
  VARIANT (1)..(15): Xaa = Any Amino Acid
CCEFCCNXPACTXGC

SEQ ID NO: 7112 - protein, 16 aa, Artificial Sequence
  Synthetically generated peptide
  VARIANT (1)..(16): Xaa = Any Amino Acid
CCEFCCNXPACTXXGC

SEQ ID NO: 7113 - protein, 17 aa, Artificial Sequence
  Synthetically generated peptide
  VARIANT (1)..(17): Xaa = Any Amino Acid
CCEFCCNXPACTXXXGC

SEQ ID NO: 7114 - protein, 17 aa, Artificial Sequence
  Synthetically generated peptide
  VARIANT (1)..(17): Xaa = Any Amino Acid
CCEFCCNXPACTXXGXC

SEQ ID NO: 7115 - protein, 16 aa, Artificial Sequence
  Synthetically generated peptide
  VARIANT (1)..(16): Xaa = Any Amino Acid
CCEFCCNXPACTXGXC

SEQ ID NO: 7116 - protein, 17 aa, Artificial Sequence
  Synthetically generated peptide
  VARIANT (1)..(17): Xaa = Any Amino Acid
CCEFCCNXPACTXGXXC

SEQ ID NO: 7117 - protein, 15 aa, Artificial Sequence
  Synthetically generated peptide
  VARIANT (1)..(15): Xaa = Any Amino Acid
CCEFCCNXPACTGXC

SEQ ID NO: 7118 - protein, 16 aa, Artificial Sequence
  Synthetically generated peptide
  VARIANT (1)..(16): Xaa = Any Amino Acid
CCEFCCNXPACTGXXC

SEQ ID NO: 7119 - protein, 17 aa, Artificial Sequence
  Synthetically generated peptide
  VARIANT (1)..(17): Xaa = Any Amino Acid
CCEFCCNXPACTGXXXC

SEQ ID NO: 7120 - protein, 14 aa, Artificial Sequence
  Synthetically generated peptide
  VARIANT (1)..(14): Xaa = Any Amino Acid
CCEFCCNPXACTGC

SEQ ID NO: 7121 - protein, 15 aa, Artificial Sequence
  Synthetically generated peptide
  VARIANT (1)..(15): Xaa = Any Amino Acid
CCEFCCNPXXACTGC

SEQ ID NO: 7122 - protein, 16 aa, Artificial Sequence
  Synthetically generated peptide
  VARIANT (1)..(16): Xaa = Any Amino Acid
CCEFCCNPXXXACTGC

SEQ ID NO: 7123 - protein, 17 aa, Artificial Sequence
  Synthetically generated peptide
  VARIANT (1)..(17): Xaa = Any Amino Acid
CCEFCCNPXXXXACTGC

SEQ ID NO: 7124 - protein, 17 aa, Artificial Sequence
  Synthetically generated peptide
  VARIANT (1)..(17): Xaa = Any Amino Acid
CCEFCCNPXXXAXCTGC

SEQ ID NO: 7125 - protein, 17 aa, Artificial Sequence
  Synthetically generated peptide
  VARIANT (1)..(17): Xaa = Any Amino Acid
CCEFCCNPXXXACXTGC

SEQ ID NO: 7126 - protein, 17 aa, Artificial Sequence
  Synthetically generated peptide
  VARIANT (1)..(17): Xaa = Any Amino Acid
CCEFCCNPXXXACTXGC

SEQ ID NO: 7127 - protein, 17 aa, Artificial Sequence
  Synthetically generated peptide
  VARIANT (1)..(17): Xaa = Any Amino Acid
CCEFCCNPXXXACTGXC

SEQ ID NO: 7128 - protein, 16 aa, Artificial Sequence
  Synthetically generated peptide
  VARIANT (1)..(16): Xaa = Any Amino Acid
CCEFCCNPXXAXCTGC

SEQ ID NO: 7129 - protein, 17 aa, Artificial Sequence
  Synthetically generated peptide
  VARIANT (1)..(17): Xaa = Any Amino Acid
CCEFCCNPXXAXXCTGC

SEQ ID NO: 7130 - protein, 17 aa, Artificial Sequence
  Synthetically generated peptide
  VARIANT (1)..(17): Xaa = Any Amino Acid
CCEFCCNPXXAXCXTGC

SEQ ID NO: 7131 - protein, 17 aa, Artificial Sequence
  Synthetically generated peptide
  VARIANT (1)..(17): Xaa = Any Amino Acid
CCEFCCNPXXAXCTXGC

SEQ ID NO: 7132 - protein, 17 aa, Artificial Sequence
  Synthetically generated peptide
  VARIANT (1)..(17): Xaa = Any Amino Acid
CCEFCCNPXXAXCTGXC

SEQ ID NO: 7133 - protein, 16 aa, Artificial Sequence
  Synthetically generated peptide
  VARIANT (1)..(16): Xaa = Any Amino Acid
CCEFCCNPXXACXTGC

SEQ ID NO: 7134 - protein, 17 aa, Artificial Sequence
  Synthetically generated peptide
  VARIANT (1)..(17): Xaa = Any Amino Acid
CCEFCCNPXXACXXTGC

SEQ ID NO: 7135 - protein, 17 aa, Artificial Sequence
  Synthetically generated peptide
  VARIANT (1)..(17): Xaa = Any Amino Acid
CCEFCCNPXXACXTXGC

SEQ ID NO: 7136 - protein, 17 aa, Artificial Sequence
  Synthetically generated peptide
  VARIANT (1)..(17): Xaa = Any Amino Acid
CCEFCCNPXXACXTGXC

SEQ ID NO: 7137 - protein, 16 aa, Artificial Sequence
  Synthetically generated peptide
  VARIANT (1)..(16): Xaa = Any Amino Acid
CCEFCCNPXXACTXGC

SEQ ID NO: 7138 - protein, 17 aa, Artificial Sequence
  Synthetically generated peptide
  VARIANT (1)..(17): Xaa = Any Amino Acid
CCEFCCNPXXACTXXGC

SEQ ID NO: 7139 - protein, 17 aa, Artificial Sequence
  Synthetically generated peptide
  VARIANT (1)..(17): Xaa = Any Amino Acid
CCEFCCNPXXACTXGXC

SEQ ID NO: 7140 - protein, 16 aa, Artificial Sequence
  Synthetically generated peptide
  VARIANT (1)..(16): Xaa = Any Amino Acid
CCEFCCNPXXACTGXC

SEQ ID NO: 7141 - protein, 17 aa, Artificial Sequence
  Synthetically generated peptide
  VARIANT (1)..(17): Xaa = Any Amino Acid
CCEFCCNPXXACTGXXC

SEQ ID NO: 7142 - protein, 15 aa, Artificial Sequence
  Synthetically generated peptide
  VARIANT (1)..(15): Xaa = Any Amino Acid
CCEFCCNPXAXCTGC

SEQ ID NO: 7143 - protein, 16 aa, Artificial Sequence
  Synthetically generated peptide
  VARIANT (1)..(16): Xaa = Any Amino Acid
CCEFCCNPXAXXCTGC

SEQ ID NO: 7144 - protein, 17 aa, Artificial Sequence
  Synthetically generated peptide
  VARIANT (1)..(17): Xaa = Any Amino Acid
CCEFCCNPXAXXXCTGC

SEQ ID NO: 7145 - protein, 17 aa, Artificial Sequence
  Synthetically generated peptide
  VARIANT (1)..(17): Xaa = Any Amino Acid
CCEFCCNPXAXXCXTGC

SEQ ID NO: 7146 - protein, 17 aa, Artificial Sequence
  Synthetically generated peptide
  VARIANT (1)..(17): Xaa = Any Amino Acid
CCEFCCNPXAXXCTXGC

SEQ ID NO: 7147 - protein, 17 aa, Artificial Sequence
  Synthetically generated peptide
  VARIANT (1)..(17): Xaa = Any Amino Acid
CCEFCCNPXAXXCTGXC

SEQ ID NO: 7148 - protein, 16 aa, Artificial Sequence
  Synthetically generated peptide
  VARIANT (1)..(16): Xaa = Any Amino Acid
CCEFCCNPXAXCXTGC

SEQ ID NO: 7149 - protein, 17 aa, Artificial Sequence
  Synthetically generated peptide
  VARIANT (1)..(17): Xaa = Any Amino Acid
CCEFCCNPXAXCXXTGC

SEQ ID NO: 7150 - protein, 17 aa, Artificial Sequence
  Synthetically generated peptide
  VARIANT (1)..(17): Xaa = Any Amino Acid
CCEFCCNPXAXCXTXGC

SEQ ID NO: 7151 - protein, 17 aa, Artificial Sequence
  Synthetically generated peptide
  VARIANT (1)..(17): Xaa = Any Amino Acid
CCEFCCNPXAXCXTGXC

SEQ ID NO: 7152 - protein, 16 aa, Artificial Sequence
  Synthetically generated peptide
  VARIANT (1)..(16): Xaa = Any Amino Acid
CCEFCCNPXAXCTXGC

SEQ ID NO: 7153 - protein, 17 aa, Artificial Sequence
  Synthetically generated peptide
  VARIANT (1)..(17): Xaa = Any Amino Acid
CCEFCCNPXAXCTXXGC

SEQ ID NO: 7154 - protein, 17 aa, Artificial Sequence
  Synthetically generated peptide
  VARIANT (1)..(17): Xaa = Any Amino Acid
CCEFCCNPXAXCTXGXC

SEQ ID NO: 7155 - protein, 16 aa, Artificial Sequence
  Synthetically generated peptide
  VARIANT (1)..(16): Xaa = Any Amino Acid
CCEFCCNPXAXCTGXC

SEQ ID NO: 7156 - protein, 17 aa, Artificial Sequence
  Synthetically generated peptide
  VARIANT (1)..(17): Xaa = Any Amino Acid
CCEFCCNPXAXCTGXXC

SEQ ID NO: 7157 - protein, 15 aa, Artificial Sequence
  Synthetically generated peptide
  VARIANT (1)..(15): Xaa = Any Amino Acid
CCEFCCNPXACXTGC

SEQ ID NO: 7158 - protein, 16 aa, Artificial Sequence
  Synthetically generated peptide
  VARIANT (1)..(16): Xaa = Any Amino Acid
CCEFCCNPXACXXTGC

SEQ ID NO: 7159 - protein, 17 aa, Artificial Sequence
  Synthetically generated peptide
  VARIANT (1)..(17): Xaa = Any Amino Acid
CCEFCCNPXACXXXTGC

SEQ ID NO: 7160 - protein, 17 aa, Artificial Sequence
  Synthetically generated peptide
  VARIANT (1)..(17): Xaa = Any Amino Acid
CCEFCCNPXACXXTXGC

SEQ ID NO: 7161 - protein, 17 aa, Artificial Sequence
  Synthetically generated peptide
  VARIANT (1)..(17): Xaa = Any Amino Acid
CCEFCCNPXACXXTGXC

SEQ ID NO: 7162 - protein, 16 aa, Artificial Sequence
  Synthetically generated peptide
  VARIANT (1)..(16): Xaa = Any Amino Acid
CCEFCCNPXACXTXGC

SEQ ID NO: 7163 - protein, 17 aa, Artificial Sequence
  Synthetically generated peptide
  VARIANT (1)..(17): Xaa = Any Amino Acid
CCEFCCNPXACXTXXGC

SEQ ID NO: 7164 - protein, 17 aa, Artificial Sequence
  Synthetically generated peptide
  VARIANT (1)..(17): Xaa = Any Amino Acid
CCEFCCNPXACXTXGXC

SEQ ID NO: 7165 - protein, 16 aa, Artificial Sequence
  Synthetically generated peptide
  VARIANT (1)..(16): Xaa = Any Amino Acid
CCEFCCNPXACXTGXC

SEQ ID NO: 7166 - protein, 17 aa, Artificial Sequence
  Synthetically generated peptide
  VARIANT (1)..(17): Xaa = Any Amino Acid
CCEFCCNPXACXTGXXC

SEQ ID NO: 7167 - protein, 15 aa, Artificial Sequence
  Synthetically generated peptide
  VARIANT (1)..(15): Xaa = Any Amino Acid
CCEFCCNPXACTXGC

SEQ ID NO: 7168 - protein, 16 aa, Artificial Sequence
  Synthetically generated peptide
  VARIANT (1)..(16): Xaa = Any Amino Acid
CCEFCCNPXACTXXGC

SEQ ID NO: 7169 - protein, 17 aa, Artificial Sequence
  Synthetically generated peptide
  VARIANT (1)..(17): Xaa = Any Amino Acid
CCEFCCNPXACTXXXGC

SEQ ID NO: 7170 - protein, 17 aa, Artificial Sequence
  Synthetically generated peptide
  VARIANT (1)..(17): Xaa = Any Amino Acid
CCEFCCNPXACTXXGXC

SEQ ID NO: 7171 - protein, 16 aa, Artificial Sequence
  Synthetically generated peptide
  VARIANT (1)..(16): Xaa = Any Amino Acid
CCEFCCNPXACTXGXC

SEQ ID NO: 7172 - protein, 17 aa, Artificial Sequence
  Synthetically generated peptide
  VARIANT (1)..(17): Xaa = Any Amino Acid
CCEFCCNPXACTXGXXC

SEQ ID NO: 7173 - protein, 15 aa, Artificial Sequence
  Synthetically generated peptide
  VARIANT (1)..(15): Xaa = Any Amino Acid
CCEFCCNPXACTGXC

SEQ ID NO: 7174 - protein, 16 aa, Artificial Sequence
  Synthetically generated peptide
  VARIANT (1)..(16): Xaa = Any Amino Acid
CCEFCCNPXACTGXXC

SEQ ID NO: 7175 - protein, 17 aa, Artificial Sequence
  Synthetically generated peptide
  VARIANT (1)..(17): Xaa = Any Amino Acid
CCEFCCNPXACTGXXXC

SEQ ID NO: 7176 - protein, 14 aa, Artificial Sequence
  Synthetically generated peptide
  VARIANT (1)..(14): Xaa = Any Amino Acid
CCEFCCNPAXCTGC

SEQ ID NO: 7177 - protein, 15 aa, Artificial Sequence
  Synthetically generated peptide
  VARIANT (1)..(15): Xaa = Any Amino Acid
CCEFCCNPAXXCTGC

SEQ ID NO: 7178 - protein, 16 aa, Artificial Sequence
  Synthetically generated peptide
  VARIANT (1)..(16): Xaa = Any Amino Acid
CCEFCCNPAXXXCTGC

SEQ ID NO: 7179 - protein, 17 aa, Artificial Sequence
  Synthetically generated peptide
  VARIANT (1)..(17): Xaa = Any Amino Acid
CCEFCCNPAXXXXCTGC

SEQ ID NO: 7180 - protein, 17 aa, Artificial Sequence
  Synthetically generated peptide
  VARIANT (1)..(17): Xaa = Any Amino Acid
CCEFCCNPAXXXCXTGC

SEQ ID NO: 7181 - protein, 17 aa, Artificial Sequence
  Synthetically generated peptide
  VARIANT (1)..(17): Xaa = Any Amino Acid
CCEFCCNPAXXXCTXGC

SEQ ID NO: 7182 - protein, 17 aa, Artificial Sequence
  Synthetically generated peptide
  VARIANT (1)..(17): Xaa = Any Amino Acid
CCEFCCNPAXXXCTGXC

SEQ ID NO: 7183 - protein, 16 aa, Artificial Sequence
  Synthetically generated peptide
  VARIANT (1)..(16): Xaa = Any Amino Acid
CCEFCCNPAXXCXTGC

SEQ ID NO: 7184 - protein, 17 aa, Artificial Sequence
  Synthetically generated peptide
  VARIANT (1)..(17): Xaa = Any Amino Acid
CCEFCCNPAXXCXXTGC

SEQ ID NO: 7185 - protein, 17 aa, Artificial Sequence
  Synthetically generated peptide
  VARIANT (1)..(17): Xaa = Any Amino Acid
CCEFCCNPAXXCXTXGC

SEQ ID NO: 7186 - protein, 17 aa, Artificial Sequence
  Synthetically generated peptide
  VARIANT (1)..(17): Xaa = Any Amino Acid
CCEFCCNPAXXCXTGXC

SEQ ID NO: 7187 - protein, 16 aa, Artificial Sequence
  Synthetically generated peptide
  VARIANT (1)..(16): Xaa = Any Amino Acid
CCEFCCNPAXXCTXGC

SEQ ID NO: 7188 - protein, 17 aa, Artificial Sequence
  Synthetically generated peptide
  VARIANT (1)..(17): Xaa = Any Amino Acid
CCEFCCNPAXXCTXXGC

SEQ ID NO: 7189 - protein, 17 aa, Artificial Sequence
  Synthetically generated peptide
  VARIANT (1)..(17): Xaa = Any Amino Acid
CCEFCCNPAXXCTXGXC

SEQ ID NO: 7190 - protein, 16 aa, Artificial Sequence
  Synthetically generated peptide
  VARIANT (1)..(16): Xaa = Any Amino Acid
CCEFCCNPAXXCTGXC

SEQ ID NO: 7191 - protein, 17 aa, Artificial Sequence
  Synthetically generated peptide
  VARIANT (1)..(17): Xaa = Any Amino Acid
CCEFCCNPAXXCTGXXC

SEQ ID NO: 7192 - protein, 15 aa, Artificial Sequence
  Synthetically generated peptide
  VARIANT (1)..(15): Xaa = Any Amino Acid
CCEFCCNPAXCXTGC

SEQ ID NO: 7193 - protein, 16 aa, Artificial Sequence
  Synthetically generated peptide
  VARIANT (1)..(16): Xaa = Any Amino Acid
CCEFCCNPAXCXXTGC

SEQ ID NO: 7194 - protein, 17 aa, Artificial Sequence
  Synthetically generated peptide
  VARIANT (1)..(17): Xaa = Any Amino Acid
CCEFCCNPAXCXXXTGC

SEQ ID NO: 7195 - protein, 17 aa, Artificial Sequence
  Synthetically generated peptide
  VARIANT (1)..(17): Xaa = Any Amino Acid
CCEFCCNPAXCXXTXGC

SEQ ID NO: 7196 - protein, 17 aa, Artificial Sequence
  Synthetically generated peptide
  VARIANT (1)..(17): Xaa = Any Amino Acid
CCEFCCNPAXCXXTGXC

SEQ ID NO: 7197 - protein, 16 aa, Artificial Sequence
  Synthetically generated peptide
  VARIANT (1)..(16): Xaa = Any Amino Acid
CCEFCCNPAXCXTXGC

SEQ ID NO: 7198 - protein, 17 aa, Artificial Sequence
  Synthetically generated peptide
  VARIANT (1)..(17): Xaa = Any Amino Acid
CCEFCCNPAXCXTXXGC

SEQ ID NO: 7199 - protein, 17 aa, Artificial Sequence
  Synthetically generated peptide
  VARIANT (1)..(17): Xaa = Any Amino Acid
CCEFCCNPAXCXTXGXC

SEQ ID NO: 7200 - protein, 16 aa, Artificial Sequence
  Synthetically generated peptide
  VARIANT (1)..(16): Xaa = Any Amino Acid
CCEFCCNPAXCXTGXC

SEQ ID NO: 7201 - protein, 17 aa, Artificial Sequence
  Synthetically generated peptide
  VARIANT (1)..(17): Xaa = Any Amino Acid
CCEFCCNPAXCXTGXXC

SEQ ID NO: 7202 - protein, 15 aa, Artificial Sequence
  Synthetically generated peptide
  VARIANT (1)..(15): Xaa = Any Amino Acid
CCEFCCNPAXCTXGC

SEQ ID NO: 7203 - protein, 16 aa, Artificial Sequence
  Synthetically generated peptide
  VARIANT (1)..(16): Xaa = Any Amino Acid
CCEFCCNPAXCTXXGC

SEQ ID NO: 7204 - protein, 17 aa, Artificial Sequence
  Synthetically generated peptide
  VARIANT (1)..(17): Xaa = Any Amino Acid
CCEFCCNPAXCTXXXGC

SEQ ID NO: 7205 - protein, 17 aa, Artificial Sequence
  Synthetically generated peptide
  VARIANT (1)..(17): Xaa = Any Amino Acid
CCEFCCNPAXCTXXGXC

SEQ ID NO: 7206 - protein, 16 aa, Artificial Sequence
  Synthetically generated peptide
  VARIANT (1)..(16): Xaa = Any Amino Acid
CCEFCCNPAXCTXGXC

SEQ ID NO: 7207 - protein, 17 aa, Artificial Sequence
  Synthetically generated peptide
  VARIANT (1)..(17): Xaa = Any Amino Acid
CCEFCCNPAXCTXGXXC

SEQ ID NO: 7208 - protein, 15 aa, Artificial Sequence
  Synthetically generated peptide
  VARIANT (1)..(15): Xaa = Any Amino Acid
CCEFCCNPAXCTGXC

SEQ ID NO: 7209 - protein, 16 aa, Artificial Sequence
  Synthetically generated peptide
  VARIANT (1)..(16): Xaa = Any Amino Acid
CCEFCCNPAXCTGXXC

SEQ ID NO: 7210 - protein, 17 aa, Artificial Sequence
  Synthetically generated peptide
  VARIANT (1)..(17): Xaa = Any Amino Acid
CCEFCCNPAXCTGXXXC

SEQ ID NO: 7211 - protein, 14 aa, Artificial Sequence
  Synthetically generated peptide
  VARIANT (1)..(14): Xaa = Any Amino Acid
CCEFCCNPACXTGC

SEQ ID NO: 7212 - protein, 15 aa, Artificial Sequence
  Synthetically generated peptide
  VARIANT (1)..(15): Xaa = Any Amino Acid
CCEFCCNPACXXTGC

SEQ ID NO: 7213 - protein, 16 aa, Artificial Sequence
  Synthetically generated peptide
  VARIANT (1)..(16): Xaa = Any Amino Acid
CCEFCCNPACXXXTGC

SEQ ID NO: 7214 - protein, 17 aa, Artificial Sequence
  Synthetically generated peptide
  VARIANT (1)..(17): Xaa = Any Amino Acid
CCEFCCNPACXXXXTGC

SEQ ID NO: 7215 - protein, 17 aa, Artificial Sequence
  Synthetically generated peptide
  VARIANT (1)..(17): Xaa = Any Amino Acid
CCEFCCNPACXXXTXGC

SEQ ID NO: 7216 - protein, 17 aa, Artificial Sequence
  Synthetically generated peptide
  VARIANT (1)..(17): Xaa = Any Amino Acid
CCEFCCNPACXXXTGXC

SEQ ID NO: 7217 - protein, 16 aa, Artificial Sequence
  Synthetically generated peptide
  VARIANT (1)..(16): Xaa = Any Amino Acid
CCEFCCNPACXXTXGC

SEQ ID NO: 7218 - protein, 17 aa, Artificial Sequence
  Synthetically generated peptide
  VARIANT (1)..(17): Xaa = Any Amino Acid
CCEFCCNPACXXTXXGC

SEQ ID NO: 7219 - protein, 17 aa, Artificial Sequence
  Synthetically generated peptide
  VARIANT (1)..(17): Xaa = Any Amino Acid
CCEFCCNPACXXTXGXC

SEQ ID NO: 7220 - protein, 16 aa, Artificial Sequence
  Synthetically generated peptide
  VARIANT (1)..(16): Xaa = Any Amino Acid
CCEFCCNPACXXTGXC

SEQ ID NO: 7221 - protein, 17 aa, Artificial Sequence
  Synthetically generated peptide
  VARIANT (1)..(17): Xaa = Any Amino Acid
CCEFCCNPACXXTGXXC

SEQ ID NO: 7222 - protein, 15 aa, Artificial Sequence
  Synthetically generated peptide
  VARIANT (1)..(15): Xaa = Any Amino Acid
CCEFCCNPACXTXGC

SEQ ID NO: 7223 - protein, 16 aa, Artificial Sequence
  Synthetically generated peptide
  VARIANT (1)..(16): Xaa = Any Amino Acid
CCEFCCNPACXTXXGC

SEQ ID NO: 7224 - protein, 17 aa, Artificial Sequence
  Synthetically generated peptide
  VARIANT (1)..(17): Xaa = Any Amino Acid
CCEFCCNPACXTXXXGC

SEQ ID NO: 7225 - protein, 17 aa, Artificial Sequence
  Synthetically generated peptide
  VARIANT (1)..(17): Xaa = Any Amino Acid
CCEFCCNPACXTXXGXC

SEQ ID NO: 7226 - protein, 16 aa, Artificial Sequence
  Synthetically generated peptide
  VARIANT (1)..(16): Xaa = Any Amino Acid
CCEFCCNPACXTXGXC

SEQ ID NO: 7227 - protein, 17 aa, Artificial Sequence
  Synthetically generated peptide
  VARIANT (1)..(17): Xaa = Any Amino Acid
CCEFCCNPACXTXGXXC

SEQ ID NO: 7228 - protein, 15 aa, Artificial Sequence
  Synthetically generated peptide
  VARIANT (1)..(15): Xaa = Any Amino Acid
CCEFCCNPACXTGXC

SEQ ID NO: 7229 - protein, 16 aa, Artificial Sequence
  Synthetically generated peptide
  VARIANT (1)..(16): Xaa = Any Amino Acid
CCEFCCNPACXTGXXC

SEQ ID NO: 7230 - protein, 17 aa, Artificial Sequence
  Synthetically generated peptide
  VARIANT (1)..(17): Xaa = Any Amino Acid
CCEFCCNPACXTGXXXC

SEQ ID NO: 7231 - protein, 14 aa, Artificial Sequence
  Synthetically generated peptide
  VARIANT (1)..(14): Xaa = Any Amino Acid
CCEFCCNPACTXGC

SEQ ID NO: 7232 - protein, 15 aa, Artificial Sequence
  Synthetically generated peptide
  VARIANT (1)..(15): Xaa = Any Amino Acid
CCEFCCNPACTXXGC

SEQ ID NO: 7233 - protein, 16 aa, Artificial Sequence
  Synthetically generated peptide
  VARIANT (1)..(16): Xaa = Any Amino Acid
CCEFCCNPACTXXXGC

SEQ ID NO: 7234 - protein, 17 aa, Artificial Sequence
  Synthetically generated peptide
  VARIANT (1)..(17): Xaa = Any Amino Acid
CCEFCCNPACTXXXXGC

SEQ ID NO: 7235 - protein, 17 aa, Artificial Sequence
  Synthetically generated peptide
  VARIANT (1)..(17): Xaa = Any Amino Acid
CCEFCCNPACTXXXGXC

SEQ ID NO: 7236 - protein, 16 aa, Artificial Sequence
  Synthetically generated peptide
  VARIANT (1)..(16): Xaa = Any Amino Acid
CCEFCCNPACTXXGXC

SEQ ID NO: 7237 - protein, 17 aa, Artificial Sequence
  Synthetically generated peptide
  VARIANT (1)..(17): Xaa = Any Amino Acid
CCEFCCNPACTXXGXXC

SEQ ID NO: 7238 - protein, 15 aa, Artificial Sequence
  Synthetically generated peptide
  VARIANT (1)..(15): Xaa = Any Amino Acid
CCEFCCNPACTXGXC

SEQ ID NO: 7239 - protein, 16 aa, Artificial Sequence
  Synthetically generated peptide
  VARIANT (1)..(16): Xaa = Any Amino Acid
CCEFCCNPACTXGXXC

SEQ ID NO: 7240 - protein, 17 aa, Artificial Sequence
  Synthetically generated peptide
  VARIANT (1)..(17): Xaa = Any Amino Acid
CCEFCCNPACTXGXXXC

SEQ ID NO: 7241 - protein, 14 aa, Artificial Sequence
  Synthetically generated peptide
  VARIANT (1)..(14): Xaa = Any Amino Acid
CCEFCCNPACTGXC

SEQ ID NO: 7242 - protein, 15 aa, Artificial Sequence
  Synthetically generated peptide
  VARIANT (1)..(15): Xaa = Any Amino Acid
CCEFCCNPACTGXXC

SEQ ID NO: 7243 - protein, 16 aa, Artificial Sequence
  Synthetically generated peptide
  VARIANT (1)..(16): Xaa = Any Amino Acid
CCEFCCNPACTGXXXC

SEQ ID NO: 7244 - protein, 17 aa, Artificial Sequence
  Synthetically generated peptide
  VARIANT (1)..(17): Xaa = Any Amino Acid
CCEFCCNPACTGXXXXC

SEQ ID NO: 7245 - protein, 13 aa, Artificial Sequence
  Synthetically generated peptide
ACELCANPACTGC

SEQ ID NO: 7246 - protein, 12 aa, Artificial Sequence
  Synthetically generated peptide
ACLCANPACTGC

SEQ ID NO: 7247 - protein, 11 aa, Artificial Sequence
  Synthetically generated peptide
ACCANPACTGC

SEQ ID NO: 7248 - protein, 11 aa, Artificial Sequence
  Synthetically generated peptide
ACLCAPACTGC

SEQ ID NO: 7249 - protein, 11 aa, Artificial Sequence
  Synthetically generated peptide
ACLCANACTGC

SEQ ID NO: 7250 - protein, 11 aa, Artificial Sequence
  Synthetically generated peptide
ACLCANPCTGC

SEQ ID NO: 7251 - protein, 11 aa, Artificial Sequence
  Synthetically generated peptide
ACLCANPACGC

SEQ ID NO: 7252 - protein, 11 aa, Artificial Sequence
  Synthetically generated peptide
ACLCANPACTC

SEQ ID NO: 7253 - protein, 12 aa, Artificial Sequence
  Synthetically generated peptide
ACECANPACTGC

SEQ ID NO: 7254 - protein, 11 aa, Artificial Sequence
  Synthetically generated peptide
ACECAPACTGC

SEQ ID NO: 7255 - protein, 11 aa, Artificial Sequence
  Synthetically generated peptide
ACECANACTGC

SEQ ID NO: 7256 - protein, 11 aa, Artificial Sequence
  Synthetically generated peptide
ACECANPCTGC

SEQ ID NO: 7257 - protein, 11 aa, Artificial Sequence
  Synthetically generated peptide
ACECANPACGC

SEQ ID NO: 7258 - protein, 11 aa, Artificial Sequence
  Synthetically generated peptide
ACECANPACTC

SEQ ID NO: 7259 - protein, 12 aa, Artificial Sequence
  Synthetically generated peptide
ACELCAPACTGC

SEQ ID NO: 7260 - protein, 11 aa, Artificial Sequence
  Synthetically generated peptide
ACELCAACTGC

SEQ ID NO: 7261 - protein, 11 aa, Artificial Sequence
  Synthetically generated peptide
ACELCAPCTGC

SEQ ID NO: 7262 - protein, 11 aa, Artificial Sequence
  Synthetically generated peptide
ACELCAPACGC

SEQ ID NO: 7263 - protein, 11 aa, Artificial Sequence
  Synthetically generated peptide
ACELCAPACTC

SEQ ID NO: 7264 - protein, 12 aa, Artificial Sequence
  Synthetically generated peptide
ACELCANACTGC

SEQ ID NO: 7265 - protein, 11 aa, Artificial Sequence
  Synthetically generated peptide
ACELCANCTGC

SEQ ID NO: 7266 - protein, 11 aa, Artificial Sequence
  Synthetically generated peptide
ACELCANACGC

SEQ ID NO: 7267 - protein, 11 aa, Artificial Sequence
  Synthetically generated peptide
ACELCANACTC

SEQ ID NO: 7268 - protein, 12 aa, Artificial Sequence
  Synthetically generated peptide
ACELCANPCTGC

SEQ ID NO: 7269 - protein, 11 aa, Artificial Sequence
  Synthetically generated peptide
ACELCANPCGC

SEQ ID NO: 7270 - protein, 11 aa, Artificial Sequence
  Synthetically generated peptide
ACELCANPCTC

SEQ ID NO: 7271 - protein, 12 aa, Artificial Sequence
  Synthetically generated peptide
ACELCANPACGC

SEQ ID NO: 7272 - protein, 11 aa, Artificial Sequence
  Synthetically generated peptide
ACELCANPACC

SEQ ID NO: 7273 - protein, 12 aa, Artificial Sequence
  Synthetically generated peptide
ACELCANPACTC

SEQ ID NO: 7274 - protein, 13 aa, Artificial Sequence
  Synthetically generated peptide
CCELACNPACTGA

SEQ ID NO: 7275 - protein, 12 aa, Artificial Sequence
  Synthetically generated peptide
CCLACNPACTGA

SEQ ID NO: 7276 - protein, 11 aa, Artificial Sequence
  Synthetically generated peptide
CCACNPACTGA

SEQ ID NO: 7277 - protein, 11 aa, Artificial Sequence
  Synthetically generated peptide
CCLACPACTGA

SEQ ID NO: 7278 - protein, 11 aa, Artificial Sequence
  Synthetically generated peptide
CCLACNACTGA

SEQ ID NO: 7279 - protein, 11 aa, Artificial Sequence
  Synthetically generated peptide
CCLACNPCTGA

SEQ ID NO: 7280 - protein, 11 aa, Artificial Sequence
  Synthetically generated peptide
CCLACNPACGA

SEQ ID NO: 7281 - protein, 11 aa, Artificial Sequence
  Synthetically generated peptide
CCLACNPACTA

SEQ ID NO: 7282 - protein, 12 aa, Artificial Sequence
  Synthetically generated peptide
CCEACNPACTGA

SEQ ID NO: 7283 - protein, 11 aa, Artificial Sequence
  Synthetically generated peptide
CCEACPACTGA

SEQ ID NO: 7284 - protein, 11 aa, Artificial Sequence
  Synthetically generated peptide
CCEACNACTGA

SEQ ID NO: 7285 - protein, 11 aa, Artificial Sequence
  Synthetically generated peptide
CCEACNPCTGA

SEQ ID NO: 7286 - protein, 11 aa, Artificial Sequence
  Synthetically generated peptide
CCEACNPACGA

SEQ ID NO: 7287 - protein, 11 aa, Artificial Sequence
  Synthetically generated peptide
CCEACNPACTA

SEQ ID NO: 7288 - protein, 12 aa, Artificial Sequence
  Synthetically generated peptide
CCELACPACTGA

SEQ ID NO: 7289 - protein, 11 aa, Artificial Sequence
  Synthetically generated peptide
CCELACACTGA

SEQ ID NO: 7290 - protein, 11 aa, Artificial Sequence
  Synthetically generated peptide
CCELACPCTGA

SEQ ID NO: 7291 - protein, 11 aa, Artificial Sequence
  Synthetically generated peptide
CCELACPACGA

SEQ ID NO: 7292 - protein, 11 aa, Artificial Sequence
  Synthetically generated peptide
CCELACPACTA

SEQ ID NO: 7293 - protein, 12 aa, Artificial Sequence
  Synthetically generated peptide
CCELACNACTGA

SEQ ID NO: 7294 - protein, 11 aa, Artificial Sequence
  Synthetically generated peptide
CCELACNCTGA

SEQ ID NO: 7295 - protein, 11 aa, Artificial Sequence
  Synthetically generated peptide
CCELACNACGA

SEQ ID NO: 7296 - protein, 11 aa, Artificial Sequence
  Synthetically generated peptide
CCELACNACTA

SEQ ID NO: 7297 - protein, 12 aa, Artificial Sequence
  Synthetically generated peptide
CCELACNPCTGA

SEQ ID NO: 7298 - protein, 11 aa, Artificial Sequence
  Synthetically generated peptide
CCELACNPCGA

SEQ ID NO: 7299 - protein, 11 aa, Artificial Sequence
  Synthetically generated peptide
CCELACNPCTA

SEQ ID NO: 7300 - protein, 12 aa, Artificial Sequence
  Synthetically generated peptide
CCELACNPACGA

SEQ ID NO: 7301 - protein, 11 aa, Artificial Sequence
  Synthetically generated peptide
CCELACNPACA

SEQ ID NO: 7302 - protein, 12 aa, Artificial Sequence
  Synthetically generated peptide
CCELACNPACTA

SEQ ID NO: 7303 - protein, 13 aa, Artificial Sequence
  Synthetically generated peptide
ACEYCANPACTGC

SEQ ID NO: 7304 - protein, 12 aa, Artificial Sequence
  Synthetically generated peptide
ACYCANPACTGC

SEQ ID NO: 7305 - protein, 11 aa, Artificial Sequence
  Synthetically generated peptide
ACCANPACTGC

SEQ ID NO: 7306 - protein, 11 aa, Artificial Sequence
  Synthetically generated peptide
ACYCAPACTGC

SEQ ID NO: 7307 - protein, 11 aa, Artificial Sequence
  Synthetically generated peptide
ACYCANACTGC

SEQ ID NO: 7308 - protein, 11 aa, Artificial Sequence
  Synthetically generated peptide
ACYCANPCTGC

SEQ ID NO: 7309 - protein, 11 aa, Artificial Sequence
  Synthetically generated peptide
ACYCANPACGC

SEQ ID NO: 7310 - protein, 11 aa, Artificial Sequence
  Synthetically generated peptide
ACYCANPACTC

SEQ ID NO: 7311 - protein, 12 aa, Artificial Sequence
  Synthetically generated peptide
ACECANPACTGC

SEQ ID NO: 7312 - protein, 11 aa, Artificial Sequence
  Synthetically generated peptide
ACECAPACTGC

SEQ ID NO: 7313 - protein, 11 aa, Artificial Sequence
  Synthetically generated peptide
ACECANACTGC

SEQ ID NO: 7314 - protein, 11 aa, Artificial Sequence
  Synthetically generated peptide
ACECANPCTGC

SEQ ID NO: 7315 - protein, 11 aa, Artificial Sequence
  Synthetically generated peptide
ACECANPACGC

SEQ ID NO: 7316 - protein, 11 aa, Artificial Sequence
  Synthetically generated peptide
ACECANPACTC

SEQ ID NO: 7317 - protein, 12 aa, Artificial Sequence
  Synthetically generated peptide
ACEYCAPACTGC

SEQ ID NO: 7318 - protein, 11 aa, Artificial Sequence
  Synthetically generated peptide
ACEYCAACTGC

SEQ ID NO: 7319 - protein, 11 aa, Artificial Sequence
  Synthetically generated peptide
ACEYCAPCTGC

SEQ ID NO: 7320 - protein, 11 aa, Artificial Sequence
  Synthetically generated peptide
ACEYCAPACGC

SEQ ID NO: 7321 - protein, 11 aa, Artificial Sequence
  Synthetically generated peptide
ACEYCAPACTC

SEQ ID NO: 7322 - protein, 12 aa, Artificial Sequence
  Synthetically generated peptide
ACEYCANACTGC

SEQ ID NO: 7323 - protein, 11 aa, Artificial Sequence
  Synthetically generated peptide
ACEYCANCTGC

SEQ ID NO: 7324 - protein, 11 aa, Artificial Sequence
  Synthetically generated peptide
ACEYCANACGC

SEQ ID NO: 7325 - protein, 11 aa, Artificial Sequence
  Synthetically generated peptide
ACEYCANACTC

SEQ ID NO: 7326 - protein, 12 aa, Artificial Sequence
  Synthetically generated peptide
ACEYCANPCTGC

SEQ ID NO: 7327 - protein, 11 aa, Artificial Sequence
  Synthetically generated peptide
ACEYCANPCGC

SEQ ID NO: 7328 - protein, 11 aa, Artificial Sequence
  Synthetically generated peptide
ACEYCANPCTC

SEQ ID NO: 7329 - protein, 12 aa, Artificial Sequence
  Synthetically generated peptide
ACEYCANPACGC

SEQ ID NO: 7330 - protein, 11 aa, Artificial Sequence
  Synthetically generated peptide
ACEYCANPACC

SEQ ID NO: 7331 - protein, 12 aa, Artificial Sequence
  Synthetically generated peptide
ACEYCANPACTC

SEQ ID NO: 7332 - protein, 13 aa, Artificial Sequence
  Synthetically generated peptide
CCEYACNPACTGA

SEQ ID NO: 7333 - protein, 12 aa, Artificial Sequence
  Synthetically generated peptide
CCYACNPACTGA

SEQ ID NO: 7334 - protein, 11 aa, Artificial Sequence
  Synthetically generated peptide
CCACNPACTGA

SEQ ID NO: 7335 - protein, 11 aa, Artificial Sequence
  Synthetically generated peptide
CCYACPACTGA

SEQ ID NO: 7336 - protein, 11 aa, Artificial Sequence
  Synthetically generated peptide
CCYACNACTGA

SEQ ID NO: 7337 - protein, 11 aa, Artificial Sequence
  Synthetically generated peptide
CCYACNPCTGA

SEQ ID NO: 7338 - protein, 11 aa, Artificial Sequence
  Synthetically generated peptide
CCYACNPACGA

SEQ ID NO: 7339 - protein, 11 aa, Artificial Sequence
  Synthetically generated peptide
CCYACNPACTA

SEQ ID NO: 7340 - protein, 12 aa, Artificial Sequence
  Synthetically generated peptide
CCEACNPACTGA

SEQ ID NO: 7341 - protein, 11 aa, Artificial Sequence
  Synthetically generated peptide
CCEACPACTGA

SEQ ID NO: 7342 - protein, 11 aa, Artificial Sequence
  Synthetically generated peptide
CCEACNACTGA

SEQ ID NO: 7343 - protein, 11 aa, Artificial Sequence
  Synthetically generated peptide
CCEACNPCTGA

SEQ ID NO: 7344 - protein, 11 aa, Artificial Sequence
  Synthetically generated peptide
CCEACNPACGA

SEQ ID NO: 7345 - protein, 11 aa, Artificial Sequence
  Synthetically generated peptide
CCEACNPACTA

SEQ ID NO: 7346 - protein, 12 aa, Artificial Sequence
  Synthetically generated peptide
CCEYACPACTGA

SEQ ID NO: 7347 - protein, 11 aa, Artificial Sequence
  Synthetically generated peptide
CCEYACACTGA

SEQ ID NO: 7348 - protein, 11 aa, Artificial Sequence
  Synthetically generated peptide
CCEYACPCTGA

SEQ ID NO: 7349 - protein, 11 aa, Artificial Sequence
  Synthetically generated peptide
CCEYACPACGA

SEQ ID NO: 7350 - protein, 11 aa, Artificial Sequence
  Synthetically generated peptide
CCEYACPACTA

SEQ ID NO: 7351 - protein, 12 aa, Artificial Sequence
  Synthetically generated peptide
CCEYACNACTGA

SEQ ID NO: 7352 - protein, 11 aa, Artificial Sequence
  Synthetically generated peptide
CCEYACNCTGA

SEQ ID NO: 7353 - protein, 11 aa, Artificial Sequence
  Synthetically generated peptide
CCEYACNACGA

SEQ ID NO: 7354 - protein, 11 aa, Artificial Sequence
  Synthetically generated peptide
CCEYACNACTA

SEQ ID NO: 7355 - protein, 12 aa, Artificial Sequence
  Synthetically generated peptide
CCEYACNPCTGA

SEQ ID NO: 7356 - protein, 11 aa, Artificial Sequence
  Synthetically generated peptide
CCEYACNPCGA

SEQ ID NO: 7357 - protein, 11 aa, Artificial Sequence
  Synthetically generated peptide
CCEYACNPCTA

SEQ ID NO: 7358 - protein, 12 aa, Artificial Sequence
  Synthetically generated peptide
CCEYACNPACGA

SEQ ID NO: 7359 - protein, 11 aa, Artificial Sequence
  Synthetically generated peptide
CCEYACNPACA

SEQ ID NO: 7360 - protein, 12 aa, Artificial Sequence
  Synthetically generated peptide
CCEYACNPACTA

SEQ ID NO: 7361 - protein, 13 aa, Artificial Sequence
  Synthetically generated peptide
ACEFCANPACTGC

SEQ ID NO: 7362 - protein, 12 aa, Artificial Sequence
  Synthetically generated peptide
ACFCANPACTGC

SEQ ID NO: 7363 - protein, 11 aa, Artificial Sequence
  Synthetically generated peptide
ACCANPACTGC

SEQ ID NO: 7364 - protein, 11 aa, Artificial Sequence
  Synthetically generated peptide
ACFCAPACTGC

SEQ ID NO: 7365 - protein, 11 aa, Artificial Sequence
  Synthetically generated peptide
ACFCANACTGC

SEQ ID NO: 7366 - protein, 11 aa, Artificial Sequence
  Synthetically generated peptide
ACFCANPCTGC

SEQ ID NO: 7367 - protein, 11 aa, Artificial Sequence
  Synthetically generated peptide
ACFCANPACGC

SEQ ID NO: 7368 - protein, 11 aa, Artificial Sequence
  Synthetically generated peptide
ACFCANPACTC

SEQ ID NO: 7369 - protein, 12 aa, Artificial Sequence
  Synthetically generated peptide
ACECANPACTGC

SEQ ID NO: 7370 - protein, 11 aa, Artificial Sequence
  Synthetically generated peptide
ACECAPACTGC

SEQ ID NO: 7371 - protein, 11 aa, Artificial Sequence
  Synthetically generated peptide
ACECANACTGC

SEQ ID NO: 7372 - protein, 11 aa, Artificial Sequence
  Synthetically generated peptide
ACECANPCTGC

SEQ ID NO: 7373 - protein, 11 aa, Artificial Sequence
  Synthetically generated peptide
ACECANPACGC

SEQ ID NO: 7374 - protein, 11 aa, Artificial Sequence
  Synthetically generated peptide
ACECANPACTC

SEQ ID NO: 7375 - protein, 12 aa, Artificial Sequence
  Synthetically generated peptide
ACEFCAPACTGC

SEQ ID NO: 7376 - protein, 11 aa, Artificial Sequence
  Synthetically generated peptide
ACEFCAACTGC

SEQ ID NO: 7377 - protein, 11 aa, Artificial Sequence
  Synthetically generated peptide
ACEFCAPCTGC

SEQ ID NO: 7378 - protein, 11 aa, Artificial Sequence
  Synthetically generated peptide
ACEFCAPACGC

SEQ ID NO: 7379 - protein, 11 aa, Artificial Sequence
  Synthetically generated peptide
ACEFCAPACTC

SEQ ID NO: 7380 - protein, 12 aa, Artificial Sequence
  Synthetically generated peptide
ACEFCANACTGC

SEQ ID NO: 7381 - protein, 11 aa, Artificial Sequence
  Synthetically generated peptide
ACEFCANCTGC

SEQ ID NO: 7382 - protein, 11 aa, Artificial Sequence
  Synthetically generated peptide
ACEFCANACGC

SEQ ID NO: 7383 - protein, 11 aa, Artificial Sequence
  Synthetically generated peptide
ACEFCANACTC

SEQ ID NO: 7384 - protein, 12 aa, Artificial Sequence
  Synthetically generated peptide
ACEFCANPCTGC

SEQ ID NO: 7385 - protein, 11 aa, Artificial Sequence
  Synthetically generated peptide
ACEFCANPCGC

SEQ ID NO: 7386 - protein, 11 aa, Artificial Sequence
  Synthetically generated peptide
ACEFCANPCTC

SEQ ID NO: 7387 - protein, 12 aa, Artificial Sequence
  Synthetically generated peptide
ACEFCANPACGC

SEQ ID NO: 7388 - protein, 11 aa, Artificial Sequence
  Synthetically generated peptide
ACEFCANPACC

SEQ ID NO: 7389 - protein, 12 aa, Artificial Sequence
  Synthetically generated peptide
ACEFCANPACTC

SEQ ID NO: 7390 - protein, 13 aa, Artificial Sequence
  Synthetically generated peptide
CCEFACNPACTGA

SEQ ID NO: 7391 - protein, 12 aa, Artificial Sequence
  Synthetically generated peptide
CCFACNPACTGA

SEQ ID NO: 7392 - protein, 11 aa, Artificial Sequence
  Synthetically generated peptide
CCACNPACTGA

SEQ ID NO: 7393 - protein, 11 aa, Artificial Sequence
  Synthetically generated peptide
CCFACPACTGA

SEQ ID NO: 7394 - protein, 11 aa, Artificial Sequence
  Synthetically generated peptide
CCFACNACTGA

SEQ ID NO: 7395 - protein, 11 aa, Artificial Sequence
  Synthetically generated peptide
CCFACNPCTGA

SEQ ID NO: 7396 - protein, 11 aa, Artificial Sequence
  Synthetically generated peptide
CCFACNPACGA

SEQ ID NO: 7397 - protein, 11 aa, Artificial Sequence
  Synthetically generated peptide
CCFACNPACTA

SEQ ID NO: 7398 - protein, 12 aa, Artificial Sequence
  Synthetically generated peptide
CCEACNPACTGA

SEQ ID NO: 7399 - protein, 11 aa, Artificial Sequence
  Synthetically generated peptide
CCEACPACTGA

SEQ ID NO: 7400 - protein, 11 aa, Artificial Sequence
  Synthetically generated peptide
CCEACNACTGA

SEQ ID NO: 7401 - protein, 11 aa, Artificial Sequence
  Synthetically generated peptide
CCEACNPCTGA

SEQ ID NO: 7402 - protein, 11 aa, Artificial Sequence
  Synthetically generated peptide
CCEACNPACGA

SEQ ID NO: 7403 - protein, 11 aa, Artificial Sequence
  Synthetically generated peptide
CCEACNPACTA

SEQ ID NO: 7404 - protein, 12 aa, Artificial Sequence
  Synthetically generated peptide
CCEFACPACTGA

SEQ ID NO: 7405 - protein, 11 aa, Artificial Sequence
  Synthetically generated peptide
CCEFACACTGA

SEQ ID NO: 7406 - protein, 11 aa, Artificial Sequence
  Synthetically generated peptide
CCEFACPCTGA

SEQ ID NO: 7407 - protein, 11 aa, Artificial Sequence
  Synthetically generated peptide
CCEFACPACGA

SEQ ID NO: 7408 - protein, 11 aa, Artificial Sequence
  Synthetically generated peptide
CCEFACPACTA

SEQ ID NO: 7409 - protein, 12 aa, Artificial Sequence
  Synthetically generated peptide
CCEFACNACTGA

SEQ ID NO: 7410 - protein, 11 aa, Artificial Sequence
  Synthetically generated peptide
CCEFACNCTGA

SEQ ID NO: 7411 - protein, 11 aa, Artificial Sequence
  Synthetically generated peptide
CCEFACNACGA

SEQ ID NO: 7412 - protein, 11 aa, Artificial Sequence
  Synthetically generated peptide
CCEFACNACTA

SEQ ID NO: 7413 - protein, 12 aa, Artificial Sequence
  Synthetically generated peptide
CCEFACNPCTGA

SEQ ID NO: 7414 - protein, 11 aa, Artificial Sequence
  Synthetically generated peptide
CCEFACNPCGA

SEQ ID NO: 7415 - protein, 11 aa, Artificial Sequence
  Synthetically generated peptide
CCEFACNPCTA

SEQ ID NO: 7416 - protein, 12 aa, Artificial Sequence
  Synthetically generated peptide
CCEFACNPACGA

SEQ ID NO: 7417 - protein, 11 aa, Artificial Sequence
  Synthetically generated peptide
CCEFACNPACA

SEQ ID NO: 7418 - protein, 12 aa, Artificial Sequence
  Synthetically generated peptide
CCEFACNPACTA

SEQ ID NO: 7419 - protein, 13 aa, Artificial Sequence
  Synthetically generated peptide
ACEWCANPACTGC

SEQ ID NO: 7420 - protein, 12 aa, Artificial Sequence
  Synthetically generated peptide
ACWCANPACTGC

SEQ ID NO: 7421 - protein, 11 aa, Artificial Sequence
  Synthetically generated peptide
ACCANPACTGC

SEQ ID NO: 7422 - protein, 11 aa, Artificial Sequence
  Synthetically generated peptide
ACWCAPACTGC

SEQ ID NO: 7423 - protein, 11 aa, Artificial Sequence
  Synthetically generated peptide
ACWCANACTGC

SEQ ID NO: 7424 - protein, 11 aa, Artificial Sequence
  Synthetically generated peptide
ACWCANPCTGC

SEQ ID NO: 7425 - protein, 11 aa, Artificial Sequence
  Synthetically generated peptide
ACWCANPACGC

SEQ ID NO: 7426 - protein, 11 aa, Artificial Sequence
  Synthetically generated peptide
ACWCANPACTC

SEQ ID NO: 7427 - protein, 12 aa, Artificial Sequence
  Synthetically generated peptide
ACECANPACTGC

SEQ ID NO: 7428 - protein, 11 aa, Artificial Sequence
  Synthetically generated peptide
ACECAPACTGC

SEQ ID NO: 7429 - protein, 11 aa, Artificial Sequence
  Synthetically generated peptide
ACECANACTGC

SEQ ID NO: 7430 - protein, 11 aa, Artificial Sequence
  Synthetically generated peptide
ACECANPCTGC

SEQ ID NO: 7431 - protein, 11 aa, Artificial Sequence
  Synthetically generated peptide
ACECANPACGC

SEQ ID NO: 7432 - protein, 11 aa, Artificial Sequence
  Synthetically generated peptide
ACECANPACTC

SEQ ID NO: 7433 - protein, 12 aa, Artificial Sequence
  Synthetically generated peptide
ACEWCAPACTGC

SEQ ID NO: 7434 - protein, 11 aa, Artificial Sequence
  Synthetically generated peptide
ACEWCAACTGC

SEQ ID NO: 7435 - protein, 11 aa, Artificial Sequence
  Synthetically generated peptide
ACEWCAPCTGC

SEQ ID NO: 7436 - protein, 11 aa, Artificial Sequence
  Synthetically generated peptide
ACEWCAPACGC

SEQ ID NO: 7437 - protein, 11 aa, Artificial Sequence
  Synthetically generated peptide
ACEWCAPACTC

SEQ ID NO: 7438 - protein, 12 aa, Artificial Sequence
  Synthetically generated peptide
ACEWCANACTGC

SEQ ID NO: 7439 - protein, 11 aa, Artificial Sequence
  Synthetically generated peptide
ACEWCANCTGC

SEQ ID NO: 7440 - protein, 11 aa, Artificial Sequence
  Synthetically generated peptide
ACEWCANACGC

SEQ ID NO: 7441 - protein, 11 aa, Artificial Sequence
  Synthetically generated peptide
ACEWCANACTC

SEQ ID NO: 7442 - protein, 12 aa, Artificial Sequence
  Synthetically generated peptide
ACEWCANPCTGC

SEQ ID NO: 7443 - protein, 11 aa, Artificial Sequence
  Synthetically generated peptide
ACEWCANPCGC

SEQ ID NO: 7444 - protein, 11 aa, Artificial Sequence
  Synthetically generated peptide
ACEWCANPCTC

SEQ ID NO: 7445 - protein, 12 aa, Artificial Sequence
  Synthetically generated peptide
ACEWCANPACGC

SEQ ID NO: 7446 - protein, 11 aa, Artificial Sequence
  Synthetically generated peptide
ACEWCANPACC

SEQ ID NO: 7447 - protein, 12 aa, Artificial Sequence
  Synthetically generated peptide
ACEWCANPACTC

SEQ ID NO: 7448 - protein, 13 aa, Artificial Sequence
  Synthetically generated peptide
CCEWACNPACTGA

SEQ ID NO: 7449 - protein, 12 aa, Artificial Sequence
  Synthetically generated peptide
ACLCANPACTGC

SEQ ID NO: 7450 - protein, 11 aa, Artificial Sequence
  Synthetically generated peptide
ACCANPACTGC

SEQ ID NO: 7451 - protein, 11 aa, Artificial Sequence
  Synthetically generated peptide
ACLCAPACTGC

SEQ ID NO: 7452 - protein, 11 aa, Artificial Sequence
  Synthetically generated peptide
ACLCANACTGC

SEQ ID NO: 7453 - protein, 11 aa, Artificial Sequence
  Synthetically generated peptide
ACLCANPCTGC

SEQ ID NO: 7454 - protein, 11 aa, Artificial Sequence
  Synthetically generated peptide
ACLCANPACGC

SEQ ID NO: 7455 - protein, 11 aa, Artificial Sequence
  Synthetically generated peptide
ACLCANPACTC

SEQ ID NO: 7456 - protein, 12 aa, Artificial Sequence
  Synthetically generated peptide
ACECANPACTGC

SEQ ID NO: 7457 - protein, 11 aa, Artificial Sequence
  Synthetically generated peptide
ACECAPACTGC

SEQ ID NO: 7458 - protein, 11 aa, Artificial Sequence
  Synthetically generated peptide
ACECANACTGC

SEQ ID NO: 7459 - protein, 11 aa, Artificial Sequence
  Synthetically generated peptide
ACECANPCTGC

SEQ ID NO: 7460 - protein, 11 aa, Artificial Sequence
  Synthetically generated peptide
ACECANPACGC

SEQ ID NO: 7461 - protein, 11 aa, Artificial Sequence
  Synthetically generated peptide
ACECANPACTC

SEQ ID NO: 7462 - protein, 12 aa, Artificial Sequence
  Synthetically generated peptide
ACELCAPACTGC

SEQ ID NO: 7463 - protein, 11 aa, Artificial Sequence
  Synthetically generated peptide
ACELCAACTGC

SEQ ID NO: 7464 - protein, 11 aa, Artificial Sequence
  Synthetically generated peptide
ACELCAPCTGC

SEQ ID NO: 7465 - protein, 11 aa, Artificial Sequence
  Synthetically generated peptide
ACELCAPACGC

SEQ ID NO: 7466 - protein, 11 aa, Artificial Sequence
  Synthetically generated peptide
ACELCAPACTC

SEQ ID NO: 7467 - protein, 12 aa, Artificial Sequence
  Synthetically generated peptide
ACELCANACTGC

SEQ ID NO: 7468 - protein, 11 aa, Artificial Sequence
  Synthetically generated peptide
ACELCANCTGC

SEQ ID NO: 7469 - protein, 11 aa, Artificial Sequence
  Synthetically generated peptide
ACELCANACGC

SEQ ID NO: 7470 - protein, 11 aa, Artificial Sequence
  Synthetically generated peptide
ACELCANACTC

SEQ ID NO: 7471 - protein, 12 aa, Artificial Sequence
  Synthetically generated peptide
ACELCANPCTGC

SEQ ID NO: 7472 - protein, 11 aa, Artificial Sequence
  Synthetically generated peptide
ACELCANPCGC

SEQ ID NO: 7473 - protein, 11 aa, Artificial Sequence
  Synthetically generated peptide
ACELCANPCTC

SEQ ID NO: 7474 - protein, 12 aa, Artificial Sequence
  Synthetically generated peptide
ACELCANPACGC

SEQ ID NO: 7475 - protein, 11 aa, Artificial Sequence
  Synthetically generated peptide
ACELCANPACC

SEQ ID NO: 7476 - protein, 12 aa, Artificial Sequence
  Synthetically generated peptide
ACELCANPACTC

SEQ ID NO: 7477 - protein, 13 aa, Artificial Sequence
  Synthetically generated peptide
CCELACNPACTGA

SEQ ID NO: 7478 - protein, 12 aa, Artificial Sequence
  Synthetically generated peptide
CCLACNPACTGA

SEQ ID NO: 7479 - protein, 11 aa, Artificial Sequence
  Synthetically generated peptide
CCACNPACTGA

SEQ ID NO: 7480 - protein, 11 aa, Artificial Sequence
  Synthetically generated peptide
CCLACPACTGA

SEQ ID NO: 7481 - protein, 11 aa, Artificial Sequence
  Synthetically generated peptide
CCLACNACTGA

SEQ ID NO: 7482 - protein, 11 aa, Artificial Sequence
  Synthetically generated peptide
CCLACNPCTGA

SEQ ID NO: 7483 - protein, 11 aa, Artificial Sequence
  Synthetically generated peptide
CCLACNPACGA

SEQ ID NO: 7484 - protein, 11 aa, Artificial Sequence
  Synthetically generated peptide
CCLACNPACTA

SEQ ID NO: 7485 - protein, 12 aa, Artificial Sequence
  Synthetically generated peptide
CCEACNPACTGA

SEQ ID NO: 7486 - protein, 11 aa, Artificial Sequence
  Synthetically generated peptide
CCEACPACTGA

SEQ ID NO: 7487 - protein, 11 aa, Artificial Sequence
  Synthetically generated peptide
CCEACNACTGA

SEQ ID NO: 7488 - protein, 11 aa, Artificial Sequence
  Synthetically generated peptide
CCEACNPCTGA

SEQ ID NO: 7489 - protein, 11 aa, Artificial Sequence
  Synthetically generated peptide
CCEACNPACGA

SEQ ID NO: 7490 - protein, 11 aa, Artificial Sequence
  Synthetically generated peptide
CCEACNPACTA

SEQ ID NO: 7491 - protein, 12 aa, Artificial Sequence
  Synthetically generated peptide
CCELACPACTGA

SEQ ID NO: 7492 - protein, 11 aa, Artificial Sequence
  Synthetically generated peptide
CCELACACTGA

SEQ ID NO: 7493 - protein, 11 aa, Artificial Sequence
  Synthetically generated peptide
CCELACPCTGA

SEQ ID NO: 7494 - protein, 11 aa, Artificial Sequence
  Synthetically generated peptide
CCELACPACGA

SEQ ID NO: 7495 - protein, 11 aa, Artificial Sequence
  Synthetically generated peptide
CCELACPACTA

SEQ ID NO: 7496 - protein, 12 aa, Artificial Sequence
  Synthetically generated peptide
CCELACNACTGA

SEQ ID NO: 7497 - protein, 11 aa, Artificial Sequence
  Synthetically generated peptide
CCELACNCTGA

SEQ ID NO: 7498 - protein, 11 aa, Artificial Sequence
  Synthetically generated peptide
CCELACNACGA

SEQ ID NO: 7499 - protein, 11 aa, Artificial Sequence
  Synthetically generated peptide
CCELACNACTA

SEQ ID NO: 7500 - protein, 12 aa, Artificial Sequence
  Synthetically generated peptide
CCELACNPCTGA

SEQ ID NO: 7501 - protein, 11 aa, Artificial Sequence
  Synthetically generated peptide
CCELACNPCGA

SEQ ID NO: 7502 - protein, 11 aa, Artificial Sequence
  Synthetically generated peptide
CCELACNPCTA

SEQ ID NO: 7503 - protein, 12 aa, Artificial Sequence
  Synthetically generated peptide
CCELACNPACGA

SEQ ID NO: 7504 - protein, 11 aa, Artificial Sequence
  Synthetically generated peptide
CCELACNPACA

SEQ ID NO: 7505 - protein, 12 aa, Artificial Sequence
  Synthetically generated peptide
CCELACNPACTA

SEQ ID NO: 7506 - protein, 13 aa, Artificial Sequence
  Synthetically generated peptide
ACEYCANPACTGC

SEQ ID NO: 7507 - protein, 12 aa, Artificial Sequence
  Synthetically generated peptide
ACYCANPACTGC

SEQ ID NO: 7508 - protein, 11 aa, Artificial Sequence
  Synthetically generated peptide
ACCANPACTGC

SEQ ID NO: 7509 - protein, 11 aa, Artificial Sequence
  Synthetically generated peptide
ACYCAPACTGC

SEQ ID NO: 7510 - protein, 11 aa, Artificial Sequence
  Synthetically generated peptide
ACYCANACTGC

SEQ ID NO: 7511 - protein, 11 aa, Artificial Sequence
  Synthetically generated peptide
ACYCANPCTGC

SEQ ID NO: 7512 - protein, 11 aa, Artificial Sequence
  Synthetically generated peptide
ACYCANPACGC

SEQ ID NO: 7513 - protein, 11 aa, Artificial Sequence
  Synthetically generated peptide
ACYCANPACTC

SEQ ID NO: 7514 - protein, 12 aa, Artificial Sequence
  Synthetically generated peptide
ACECANPACTGC

SEQ ID NO: 7515 - protein, 11 aa, Artificial Sequence
  Synthetically generated peptide
ACECAPACTGC

SEQ ID NO: 7516 - protein, 11 aa, Artificial Sequence
  Synthetically generated peptide
ACECANACTGC

SEQ ID NO: 7517 - protein, 11 aa, Artificial Sequence
  Synthetically generated peptide
ACECANPCTGC

SEQ ID NO: 7518 - protein, 11 aa, Artificial Sequence
  Synthetically generated peptide
ACECANPACGC

SEQ ID NO: 7519 - protein, 11 aa, Artificial Sequence
  Synthetically generated peptide
ACECANPACTC

SEQ ID NO: 7520 - protein, 12 aa, Artificial Sequence
  Synthetically generated peptide
ACEYCAPACTGC

SEQ ID NO: 7521 - protein, 11 aa, Artificial Sequence
  Synthetically generated peptide
ACEYCAACTGC

SEQ ID NO: 7522 - protein, 11 aa, Artificial Sequence
  Synthetically generated peptide
ACEYCAPCTGC

SEQ ID NO: 7523 - protein, 11 aa, Artificial Sequence
  Synthetically generated peptide
ACEYCAPACGC

SEQ ID NO: 7524 - protein, 11 aa, Artificial Sequence
  Synthetically generated peptide
ACEYCAPACTC

SEQ ID NO: 7525 - protein, 12 aa, Artificial Sequence
  Synthetically generated peptide
ACEYCANACTGC

SEQ ID NO: 7526 - protein, 11 aa, Artificial Sequence
  Synthetically generated peptide
ACEYCANCTGC

SEQ ID NO: 7527 - protein, 11 aa, Artificial Sequence
  Synthetically generated peptide
ACEYCANACGC

SEQ ID NO: 7528 - protein, 11 aa, Artificial Sequence
  Synthetically generated peptide
ACEYCANACTC

SEQ ID NO: 7529 - protein, 12 aa, Artificial Sequence
  Synthetically generated peptide
ACEYCANPCTGC

SEQ ID NO: 7530 - protein, 11 aa, Artificial Sequence
  Synthetically generated peptide
ACEYCANPCGC

SEQ ID NO: 7531 - protein, 11 aa, Artificial Sequence
  Synthetically generated peptide
ACEYCANPCTC

SEQ ID NO: 7532 - protein, 12 aa, Artificial Sequence
  Synthetically generated peptide
ACEYCANPACGC

SEQ ID NO: 7533 - protein, 11 aa, Artificial Sequence
  Synthetically generated peptide
ACEYCANPACC

SEQ ID NO: 7534 - protein, 12 aa, Artificial Sequence
  Synthetically generated peptide
ACEYCANPACTC

SEQ ID NO: 7535 - protein, 13 aa, Artificial Sequence
  Synthetically generated peptide
CCEYACNPACTGA

SEQ ID NO: 7536 - protein, 12 aa, Artificial Sequence
  Synthetically generated peptide
CCYACNPACTGA

SEQ ID NO: 7537 - protein, 11 aa, Artificial Sequence
  Synthetically generated peptide
CCACNPACTGA

SEQ ID NO: 7538 - protein, 11 aa, Artificial Sequence
  Synthetically generated peptide
CCYACPACTGA

SEQ ID NO: 7539 - protein, 11 aa, Artificial Sequence
  Synthetically generated peptide
CCYACNACTGA

SEQ ID NO: 7540 - protein, 11 aa, Artificial Sequence
  Synthetically generated peptide
CCYACNPCTGA

SEQ ID NO: 7541 - protein, 11 aa, Artificial Sequence
  Synthetically generated peptide
CCYACNPACGA

SEQ ID NO: 7542 - protein, 11 aa, Artificial Sequence
  Synthetically generated peptide
CCYACNPACTA

SEQ ID NO: 7543 - protein, 12 aa, Artificial Sequence
  Synthetically generated peptide
CCEACNPACTGA

SEQ ID NO: 7544 - protein, 11 aa, Artificial Sequence
  Synthetically generated peptide
CCEACPACTGA

SEQ ID NO: 7545 - protein, 11 aa, Artificial Sequence
  Synthetically generated peptide
CCEACNACTGA

SEQ ID NO: 7546 - protein, 11 aa, Artificial Sequence
  Synthetically generated peptide
CCEACNPCTGA

SEQ ID NO: 7547 - protein, 11 aa, Artificial Sequence
  Synthetically generated peptide
CCEACNPACGA

SEQ ID NO: 7548 - protein, 11 aa, Artificial Sequence
  Synthetically generated peptide
CCEACNPACTA

SEQ ID NO: 7549 - protein, 12 aa, Artificial Sequence
  Synthetically generated peptide
CCEYACPACTGA

SEQ ID NO: 7550 - protein, 11 aa, Artificial Sequence
  Synthetically generated peptide
CCEYACACTGA

SEQ ID NO: 7551 - protein, 11 aa, Artificial Sequence
  Synthetically generated peptide
CCEYACPCTGA

SEQ ID NO: 7552 - protein, 11 aa, Artificial Sequence
  Synthetically generated peptide
CCEYACPACGA

SEQ ID NO: 7553 - protein, 11 aa, Artificial Sequence
  Synthetically generated peptide
CCEYACPACTA

SEQ ID NO: 7554 - protein, 12 aa, Artificial Sequence
  Synthetically generated peptide
CCEYACNACTGA

SEQ ID NO: 7555 - protein, 11 aa, Artificial Sequence
  Synthetically generated peptide
CCEYACNCTGA

SEQ ID NO: 7556 - protein, 11 aa, Artificial Sequence
  Synthetically generated peptide
CCEYACNACGA

SEQ ID NO: 7557 - protein, 11 aa, Artificial Sequence
  Synthetically generated peptide
CCEYACNACTA

SEQ ID NO: 7558 - protein, 12 aa, Artificial Sequence
  Synthetically generated peptide
CCEYACNPCTGA

SEQ ID NO: 7559 - protein, 11 aa, Artificial Sequence
  Synthetically generated peptide
CCEYACNPCGA

SEQ ID NO: 7560 - protein, 11 aa, Artificial Sequence
  Synthetically generated peptide
CCEYACNPCTA

SEQ ID NO: 7561 - protein, 12 aa, Artificial Sequence
  Synthetically generated peptide
CCEYACNPACGA

SEQ ID NO: 7562 - protein, 11 aa, Artificial Sequence
  Synthetically generated peptide
CCEYACNPACA

SEQ ID NO: 7563 - protein, 12 aa, Artificial Sequence
  Synthetically generated peptide
CCEYACNPACTA

SEQ ID NO: 7564 - protein, 13 aa, Artificial Sequence
  Synthetically generated peptide
ACEFCANPACTGC

SEQ ID NO: 7565 - protein, 12 aa, Artificial Sequence
  Synthetically generated peptide
ACFCANPACTGC

SEQ ID NO: 7566 - protein, 11 aa, Artificial Sequence
  Synthetically generated peptide
ACCANPACTGC

SEQ ID NO: 7567 - protein, 11 aa, Artificial Sequence
  Synthetically generated peptide
ACFCAPACTGC

SEQ ID NO: 7568 - protein, 11 aa, Artificial Sequence
  Synthetically generated peptide
ACFCANACTGC

SEQ ID NO: 7569 - protein, 11 aa, Artificial Sequence
  Synthetically generated peptide
ACFCANPCTGC

SEQ ID NO: 7570 - protein, 11 aa, Artificial Sequence
  Synthetically generated peptide
ACFCANPACGC

SEQ ID NO: 7571 - protein, 11 aa, Artificial Sequence
  Synthetically generated peptide
ACFCANPACTC

SEQ ID NO: 7572 - protein, 12 aa, Artificial Sequence
  Synthetically generated peptide
ACECANPACTGC

SEQ ID NO: 7573 - protein, 11 aa, Artificial Sequence
  Synthetically generated peptide
ACECAPACTGC

SEQ ID NO: 7574 - protein, 11 aa, Artificial Sequence
  Synthetically generated peptide
ACECANACTGC

SEQ ID NO: 7575 - protein, 11 aa, Artificial Sequence
  Synthetically generated peptide
ACECANPCTGC

SEQ ID NO: 7576 - protein, 11 aa, Artificial Sequence
  Synthetically generated peptide
ACECANPACGC

SEQ ID NO: 7577 - protein, 11 aa, Artificial Sequence
  Synthetically generated peptide
ACECANPACTC

SEQ ID NO: 7578 - protein, 12 aa, Artificial Sequence
  Synthetically generated peptide
ACEFCAPACTGC

SEQ ID NO: 7579 - protein, 11 aa, Artificial Sequence
  Synthetically generated peptide
ACEFCAACTGC

SEQ ID NO: 7580 - protein, 11 aa, Artificial Sequence
  Synthetically generated peptide
ACEFCAPCTGC

SEQ ID NO: 7581 - protein, 11 aa, Artificial Sequence
  Synthetically generated peptide
ACEFCAPACGC

SEQ ID NO: 7582 - protein, 11 aa, Artificial Sequence
  Synthetically generated peptide
ACEFCAPACTC

SEQ ID NO: 7583 - protein, 12 aa, Artificial Sequence
  Synthetically generated peptide
ACEFCANACTGC

SEQ ID NO: 7584 - protein, 11 aa, Artificial Sequence
  Synthetically generated peptide
ACEFCANCTGC

SEQ ID NO: 7585 - protein, 11 aa, Artificial Sequence
  Synthetically generated peptide
ACEFCANACGC

SEQ ID NO: 7586 - protein, 11 aa, Artificial Sequence
  Synthetically generated peptide
ACEFCANACTC

SEQ ID NO: 7587 - protein, 12 aa, Artificial Sequence
  Synthetically generated peptide
ACEFCANPCTGC

SEQ ID NO: 7588 - protein, 11 aa, Artificial Sequence
  Synthetically generated peptide
ACEFCANPCGC

SEQ ID NO: 7589 - protein, 11 aa, Artificial Sequence
  Synthetically generated peptide
ACEFCANPCTC

SEQ ID NO: 7590 - protein, 12 aa, Artificial Sequence
  Synthetically generated peptide
ACEFCANPACGC

SEQ ID NO: 7591 - protein, 11 aa, Artificial Sequence
  Synthetically generated peptide
ACEFCANPACC

SEQ ID NO: 7592 - protein, 12 aa, Artificial Sequence
  Synthetically generated peptide
ACEFCANPACTC

SEQ ID NO: 7593 - protein, 13 aa, Artificial Sequence
  Synthetically generated peptide
CCEFACNPACTGA

SEQ ID NO: 7594 - protein, 12 aa, Artificial Sequence
  Synthetically generated peptide
CCFACNPACTGA

SEQ ID NO: 7595 - protein, 11 aa, Artificial Sequence
  Synthetically generated peptide
CCACNPACTGA

SEQ ID NO: 7596 - protein, 11 aa, Artificial Sequence
  Synthetically generated peptide
CCFACPACTGA

SEQ ID NO: 7597 - protein, 11 aa, Artificial Sequence
  Synthetically generated peptide
CCFACNACTGA

SEQ ID NO: 7598 - protein, 11 aa, Artificial Sequence
  Synthetically generated peptide
CCFACNPCTGA

SEQ ID NO: 7599 - protein, 11 aa, Artificial Sequence
  Synthetically generated peptide
CCFACNPACGA

SEQ ID NO: 7600 - protein, 11 aa, Artificial Sequence
  Synthetically generated peptide
CCFACNPACTA

SEQ ID NO: 7601 - protein, 12 aa, Artificial Sequence
  Synthetically generated peptide
CCEACNPACTGA

SEQ ID NO: 7602 - protein, 11 aa, Artificial Sequence
  Synthetically generated peptide
CCEACPACTGA

SEQ ID NO: 7603 - protein, 11 aa, Artificial Sequence
  Synthetically generated peptide
CCEACNACTGA

SEQ ID NO: 7604 - protein, 11 aa, Artificial Sequence
  Synthetically generated peptide
CCEACNPCTGA

SEQ ID NO: 7605 - protein, 11 aa, Artificial Sequence
  Synthetically generated peptide
CCEACNPACGA

SEQ ID NO: 7606 - protein, 11 aa, Artificial Sequence
  Synthetically generated peptide
CCEACNPACTA

SEQ ID NO: 7607 - protein, 12 aa, Artificial Sequence
  Synthetically generated peptide
CCEFACPACTGA

SEQ ID NO: 7608 - protein, 11 aa, Artificial Sequence
  Synthetically generated peptide
CCEFACACTGA

SEQ ID NO: 7609 - protein, 11 aa, Artificial Sequence
  Synthetically generated peptide
CCEFACPCTGA

SEQ ID NO: 7610 - protein, 11 aa, Artificial Sequence
  Synthetically generated peptide
CCEFACPACGA

SEQ ID NO: 7611 - protein, 11 aa, Artificial Sequence
  Synthetically generated peptide
CCEFACPACTA

SEQ ID NO: 7612 - protein, 12 aa, Artificial Sequence
  Synthetically generated peptide
CCEFACNACTGA

SEQ ID NO: 7613 - protein, 11 aa, Artificial Sequence
  Synthetically generated peptide
CCEFACNCTGA

SEQ ID NO: 7614 - protein, 11 aa, Artificial Sequence
  Synthetically generated peptide
CCEFACNACGA

SEQ ID NO: 7615 - protein, 11 aa, Artificial Sequence
  Synthetically generated peptide
CCEFACNACTA

SEQ ID NO: 7616 - protein, 12 aa, Artificial Sequence
  Synthetically generated peptide
CCEFACNPCTGA

SEQ ID NO: 7617 - protein, 11 aa, Artificial Sequence
  Synthetically generated peptide
CCEFACNPCGA

SEQ ID NO: 7618 - protein, 11 aa, Artificial Sequence
  Synthetically generated peptide
CCEFACNPCTA

SEQ ID NO: 7619 - protein, 12 aa, Artificial Sequence
  Synthetically generated peptide
CCEFACNPACGA

SEQ ID NO: 7620 - protein, 11 aa, Artificial Sequence
  Synthetically generated peptide
CCEFACNPACA

SEQ ID NO: 7621 - protein, 12 aa, Artificial Sequence
  Synthetically generated peptide
CCEFACNPACTA

SEQ ID NO: 7622 - protein, 13 aa, Artificial Sequence
  Synthetically generated peptide
ACEWCANPACTGC

SEQ ID NO: 7623 - protein, 12 aa, Artificial Sequence
  Synthetically generated peptide
ACWCANPACTGC

SEQ ID NO: 7624 - protein, 11 aa, Artificial Sequence
  Synthetically generated peptide
ACCANPACTGC

SEQ ID NO: 7625 - protein, 11 aa, Artificial Sequence
  Synthetically generated peptide
ACWCAPACTGC

SEQ ID NO: 7626 - protein, 11 aa, Artificial Sequence
  Synthetically generated peptide
ACWCANACTGC

SEQ ID NO: 7627 - protein, 11 aa, Artificial Sequence
  Synthetically generated peptide
ACWCANPCTGC

SEQ ID NO: 7628 - protein, 11 aa, Artificial Sequence
  Synthetically generated peptide
ACWCANPACGC

SEQ ID NO: 7629 - protein, 11 aa, Artificial Sequence
  Synthetically generated peptide
ACWCANPACTC

SEQ ID NO: 7630 - protein, 12 aa, Artificial Sequence
  Synthetically generated peptide
ACECANPACTGC

SEQ ID NO: 7631 - protein, 11 aa, Artificial Sequence
  Synthetically generated peptide
ACECAPACTGC

SEQ ID NO: 7632 - protein, 11 aa, Artificial Sequence
  Synthetically generated peptide
ACECANACTGC

SEQ ID NO: 7633 - protein, 11 aa, Artificial Sequence
  Synthetically generated peptide
ACECANPCTGC

SEQ ID NO: 7634 - protein, 11 aa, Artificial Sequence
  Synthetically generated peptide
ACECANPACGC

SEQ ID NO: 7635 - protein, 11 aa, Artificial Sequence
  Synthetically generated peptide
ACECANPACTC

SEQ ID NO: 7636 - protein, 12 aa, Artificial Sequence
  Synthetically generated peptide
ACEWCAPACTGC

SEQ ID NO: 7637 - protein, 11 aa, Artificial Sequence
  Synthetically generated peptide
ACEWCAACTGC

SEQ ID NO: 7638 - protein, 11 aa, Artificial Sequence
  Synthetically generated peptide
ACEWCAPCTGC

SEQ ID NO: 7639 - protein, 11 aa, Artificial Sequence
  Synthetically generated peptide
ACEWCAPACGC

SEQ ID NO: 7640 - protein, 11 aa, Artificial Sequence
  Synthetically generated peptide
ACEWCAPACTC

SEQ ID NO: 7641 - protein, 12 aa, Artificial Sequence
  Synthetically generated peptide
ACEWCANACTGC

SEQ ID NO: 7642 - protein, 11 aa, Artificial Sequence
  Synthetically generated peptide
ACEWCANCTGC

SEQ ID NO: 7643 - protein, 11 aa, Artificial Sequence
  Synthetically generated peptide
ACEWCANACGC

SEQ ID NO: 7644 - protein, 11 aa, Artificial Sequence
  Synthetically generated peptide
ACEWCANACTC

SEQ ID NO: 7645 - protein, 12 aa, Artificial Sequence
  Synthetically generated peptide
ACEWCANPCTGC

SEQ ID NO: 7646 - protein, 11 aa, Artificial Sequence
  Synthetically generated peptide
ACEWCANPCGC

SEQ ID NO: 7647 - protein, 11 aa, Artificial Sequence
  Synthetically generated peptide
ACEWCANPCTC

SEQ ID NO: 7648 - protein, 12 aa, Artificial Sequence
  Synthetically generated peptide
ACEWCANPACGC

SEQ ID NO: 7649 - protein, 11 aa, Artificial Sequence
  Synthetically generated peptide
ACEWCANPACC

SEQ ID NO: 7650 - protein, 12 aa, Artificial Sequence
  Synthetically generated peptide
ACEWCANPACTC

SEQ ID NO: 7651 - protein, 13 aa, Artificial Sequence
  Synthetically generated peptide
CCEWACNPACTGA

SEQ ID NO: 7652 - protein, 12 aa, Artificial Sequence
  Synthetically generated peptide
CCWACNPACTGA

SEQ ID NO: 7653 - protein, 11 aa, Artificial Sequence
  Synthetically generated peptide
CCACNPACTGA

SEQ ID NO: 7654 - protein, 11 aa, Artificial Sequence
  Synthetically generated peptide
CCWACPACTGA

SEQ ID NO: 7655 - protein, 11 aa, Artificial Sequence
  Synthetically generated peptide
CCWACNACTGA

SEQ ID NO: 7656 - protein, 11 aa, Artificial Sequence
  Synthetically generated peptide
CCWACNPCTGA

SEQ ID NO: 7657 - protein, 11 aa, Artificial Sequence
  Synthetically generated peptide
CCWACNPACGA

SEQ ID NO: 7658 - protein, 11 aa, Artificial Sequence
  Synthetically generated peptide
CCWACNPACTA

SEQ ID NO: 7659 - protein, 12 aa, Artificial Sequence
  Synthetically generated peptide
CCEACNPACTGA

SEQ ID NO: 7660 - protein, 11 aa, Artificial Sequence
  Synthetically generated peptide
CCEACPACTGA

SEQ ID NO: 7661 - protein, 11 aa, Artificial Sequence
  Synthetically generated peptide
CCEACNACTGA

SEQ ID NO: 7662 - protein, 11 aa, Artificial Sequence
  Synthetically generated peptide
CCEACNPCTGA

SEQ ID NO: 7663 - protein, 11 aa, Artificial Sequence
  Synthetically generated peptide
CCEACNPACGA

SEQ ID NO: 7664 - protein, 11 aa, Artificial Sequence
  Synthetically generated peptide
CCEACNPACTA

SEQ ID NO: 7665 - protein, 12 aa, Artificial Sequence
  Synthetically generated peptide
CCEWACPACTGA

SEQ ID NO: 7666 - protein, 11 aa, Artificial Sequence
  Synthetically generated peptide
CCEWACACTGA

SEQ ID NO: 7667 - protein, 11 aa, Artificial Sequence
  Synthetically generated peptide
CCEWACPCTGA

SEQ ID NO: 7668 - protein, 11 aa, Artificial Sequence
  Synthetically generated peptide
CCEWACPACGA

SEQ ID NO: 7669 - protein, 11 aa, Artificial Sequence
  Synthetically generated peptide
CCEWACPACTA

SEQ ID NO: 7670 - protein, 12 aa, Artificial Sequence
  Synthetically generated peptide
CCEWACNACTGA

SEQ ID NO: 7671 - protein, 11 aa, Artificial Sequence
  Synthetically generated peptide
CCEWACNCTGA

SEQ ID NO: 7672 - protein, 11 aa, Artificial Sequence
  Synthetically generated peptide
CCEWACNACGA

SEQ ID NO: 7673 - protein, 11 aa, Artificial Sequence
  Synthetically generated peptide
CCEWACNACTA

SEQ ID NO: 7674 - protein, 12 aa, Artificial Sequence
  Synthetically generated peptide
CCEWACNPCTGA

SEQ ID NO: 7675 - protein, 11 aa, Artificial Sequence
  Synthetically generated peptide
CCEWACNPCGA

SEQ ID NO: 7676 - protein, 11 aa, Artificial Sequence
  Synthetically generated peptide
CCEWACNPCTA

SEQ ID NO: 7677 - protein, 12 aa, Artificial Sequence
  Synthetically generated peptide
CCEWACNPACGA

SEQ ID NO: 7678 - protein, 11 aa, Artificial Sequence
  Synthetically generated peptide
CCEWACNPACA

SEQ ID NO: 7679 - protein, 12 aa, Artificial Sequence
  Synthetically generated peptide
CCEWACNPACTA

SEQ ID NO: 7680 - protein, 14 aa, Artificial Sequence
  Synthetically generated peptide
  VARIANT (1)..(14): Xaa = Any Amino Acid
ACXELCANPACTGC

SEQ ID NO: 7681 - protein, 16 aa, Artificial Sequence
  Synthetically generated peptide
  VARIANT (1)..(16): Xaa = Any Amino Acid
AACXXELCANPACTGC

SEQ ID NO: 7682 - protein, 16 aa, Artificial Sequence
  Synthetically generated peptide
  VARIANT (1)..(16): Xaa = Any Amino Acid
ACXXXELCANPACTGC

SEQ ID NO: 7683 - protein, 18 aa, Artificial Sequence
  Synthetically generated peptide
  VARIANT (1)..(18): Xaa = Any Amino Acid
AACXXXXELCANPACTGC

SEQ ID NO: 7684 - protein, 17 aa, Artificial Sequence
  Synthetically generated peptide
  VARIANT (1)..(17): Xaa = Any Amino Acid
ACXXXEXLCANPACTGC

SEQ ID NO: 7685 - protein, 17 aa, Artificial Sequence
  Synthetically generated peptide
  VARIANT (1)..(17): Xaa = Any Amino Acid
ACXXXELXCANPACTGC

SEQ ID NO: 7686 - protein, 17 aa, Artificial Sequence
  Synthetically generated peptide
  VARIANT (1)..(17): Xaa = Any Amino Acid
ACXXXELCAXNPACTGC

SEQ ID NO: 7687 - protein, 17 aa, Artificial Sequence
  Synthetically generated peptide
  VARIANT (1)..(17): Xaa = Any Amino Acid
ACXXXELCANXPACTGC

SEQ ID NO: 7688 - protein, 17 aa, Artificial Sequence
  Synthetically generated peptide
  VARIANT (1)..(17): Xaa = Any Amino Acid
ACXXXELCANPXACTGC

SEQ ID NO: 7689 - protein, 17 aa, Artificial Sequence
  Synthetically generated peptide
  VARIANT (1)..(17): Xaa = Any Amino Acid
ACXXXELCANPAXCTGC

SEQ ID NO: 7690 - protein, 17 aa, Artificial Sequence
  Synthetically generated peptide
  VARIANT (1)..(17): Xaa = Any Amino Acid
ACXXXELCANPACXTGC

SEQ ID NO: 7691 - protein, 17 aa, Artificial Sequence
  Synthetically generated peptide
  VARIANT (1)..(17): Xaa = Any Amino Acid
ACXXXELCANPACTXGC

SEQ ID NO: 7692 - protein, 17 aa, Artificial Sequence
  Synthetically generated peptide
  VARIANT (1)..(17): Xaa = Any Amino Acid
ACXXXELCANPACTGXC

SEQ ID NO: 7693 - protein, 16 aa, Artificial Sequence
  Synthetically generated peptide
  VARIANT (1)..(16): Xaa = Any Amino Acid
ACXXEXLCANPACTGC

SEQ ID NO: 7694 - protein, 17 aa, Artificial Sequence
  Synthetically generated peptide
  VARIANT (1)..(17): Xaa = Any Amino Acid
ACXXEXXLCANPACTGC

SEQ ID NO: 7695 - protein, 17 aa, Artificial Sequence
  Synthetically generated peptide
  VARIANT (1)..(17): Xaa = Any Amino Acid
ACXXEXLXCANPACTGC

SEQ ID NO: 7696 - protein, 17 aa, Artificial Sequence
  Synthetically generated peptide
  VARIANT (1)..(17): Xaa = Any Amino Acid
ACXXEXLCAXNPACTGC

SEQ ID NO: 7697 - protein, 17 aa, Artificial Sequence
  Synthetically generated peptide
  VARIANT (1)..(17): Xaa = Any Amino Acid
ACXXEXLCANXPACTGC

SEQ ID NO: 7698 - protein, 17 aa, Artificial Sequence
  Synthetically generated peptide
  VARIANT (1)..(17): Xaa = Any Amino Acid
ACXXEXLCANPXACTGC

SEQ ID NO: 7699 - protein, 17 aa, Artificial Sequence
  Synthetically generated peptide
  VARIANT (1)..(17): Xaa = Any Amino Acid
ACXXEXLCANPAXCTGC

SEQ ID NO: 7700 - protein, 17 aa, Artificial Sequence
  Synthetically generated peptide
  VARIANT (1)..(17): Xaa = Any Amino Acid
ACXXEXLCANPACXTGC

SEQ ID NO: 7701 - protein, 17 aa, Artificial Sequence
  Synthetically generated peptide
  VARIANT (1)..(17): Xaa = Any Amino Acid
ACXXEXLCANPACTXGC

SEQ ID NO: 7702 - protein, 17 aa, Artificial Sequence
  Synthetically generated peptide
  VARIANT (1)..(17): Xaa = Any Amino Acid
ACXXEXLCANPACTGXC

SEQ ID NO: 7703 - protein, 16 aa, Artificial Sequence
  Synthetically generated peptide
  VARIANT (1)..(16): Xaa = Any Amino Acid
ACXXELXCANPACTGC

SEQ ID NO: 7704 - protein, 17 aa, Artificial Sequence
  Synthetically generated peptide
  VARIANT (1)..(17): Xaa = Any Amino Acid
ACXXELXXCANPACTGC

SEQ ID NO: 7705 - protein, 17 aa, Artificial Sequence
  Synthetically generated peptide
  VARIANT (1)..(17): Xaa = Any Amino Acid
ACXXELXCAXNPACTGC

SEQ ID NO: 7706 - protein, 17 aa, Artificial Sequence
  Synthetically generated peptide
  VARIANT (1)..(17): Xaa = Any Amino Acid
ACXXELXCANXPACTGC

SEQ ID NO: 7707 - protein, 17 aa, Artificial Sequence
  Synthetically generated peptide
  VARIANT (1)..(17): Xaa = Any Amino Acid
ACXXELXCANPXACTGC

SEQ ID NO: 7708 - protein, 17 aa, Artificial Sequence
  Synthetically generated peptide
  VARIANT (1)..(17): Xaa = Any Amino Acid
ACXXELXCANPAXCTGC

SEQ ID NO: 7709 - protein, 17 aa, Artificial Sequence
  Synthetically generated peptide
  VARIANT (1)..(17): Xaa = Any Amino Acid
ACXXELXCANPACXTGC

SEQ ID NO: 7710 - protein, 17 aa, Artificial Sequence
  Synthetically generated peptide
  VARIANT (1)..(17): Xaa = Any Amino Acid
ACXXELXCANPACTXGC

SEQ ID NO: 7711 - protein, 17 aa, Artificial Sequence
  Synthetically generated peptide
  VARIANT (1)..(17): Xaa = Any Amino Acid
ACXXELXCANPACTGXC

SEQ ID NO: 7712 - protein, 16 aa, Artificial Sequence
  Synthetically generated peptide
  VARIANT (1)..(16): Xaa = Any Amino Acid
ACXXELCAXNPACTGC

SEQ ID NO: 7713 - protein, 17 aa, Artificial Sequence
  Synthetically generated peptide
  VARIANT (1)..(17): Xaa = Any Amino Acid
ACXXELCAXXNPACTGC

SEQ ID NO: 7714 - protein, 17 aa, Artificial Sequence
  Synthetically generated peptide
  VARIANT (1)..(17): Xaa = Any Amino Acid
ACXXELCAXNXPACTGC

SEQ ID NO: 7715 - protein, 17 aa, Artificial Sequence
  Synthetically generated peptide
  VARIANT (1)..(17): Xaa = Any Amino Acid
ACXXELCAXNPXACTGC

SEQ ID NO: 7716 - protein, 17 aa, Artificial Sequence
  Synthetically generated peptide
  VARIANT (1)..(17): Xaa = Any Amino Acid
ACXXELCAXNPAXCTGC

SEQ ID NO: 7717 - protein, 17 aa, Artificial Sequence
  Synthetically generated peptide
  VARIANT (1)..(17): Xaa = Any Amino Acid
ACXXELCAXNPACXTGC

SEQ ID NO: 7718 - protein, 17 aa, Artificial Sequence
  Synthetically generated peptide
  VARIANT (1)..(17): Xaa = Any Amino Acid
ACXXELCAXNPACTXGC

SEQ ID NO: 7719 - protein, 17 aa, Artificial Sequence
  Synthetically generated peptide
  VARIANT (1)..(17): Xaa = Any Amino Acid
ACXXELCAXNPACTGXC

SEQ ID NO: 7720 - protein, 16 aa, Artificial Sequence
  Synthetically generated peptide
  VARIANT (1)..(16): Xaa = Any Amino Acid
ACXXELCANXPACTGC

SEQ ID NO: 7721 - protein, 17 aa, Artificial Sequence
  Synthetically generated peptide
  VARIANT (1)..(17): Xaa = Any Amino Acid
ACXXELCANXXPACTGC

SEQ ID NO: 7722 - protein, 17 aa, Artificial Sequence
  Synthetically generated peptide
  VARIANT (1)..(17): Xaa = Any Amino Acid
ACXXELCANXPXACTGC

SEQ ID NO: 7723 - protein, 17 aa, Artificial Sequence
  Synthetically generated peptide
  VARIANT (1)..(17): Xaa = Any Amino Acid
ACXXELCANXPAXCTGC

SEQ ID NO: 7724 - protein, 17 aa, Artificial Sequence
  Synthetically generated peptide
  VARIANT (1)..(17): Xaa = Any Amino Acid
ACXXELCANXPACXTGC

SEQ ID NO: 7725 - protein, 17 aa, Artificial Sequence
  Synthetically generated peptide
  VARIANT (1)..(17): Xaa = Any Amino Acid
ACXXELCANXPACTXGC

SEQ ID NO: 7726 - protein, 17 aa, Artificial Sequence
  Synthetically generated peptide
  VARIANT (1)..(17): Xaa = Any Amino Acid
ACXXELCANXPACTGXC

SEQ ID NO: 7727 - protein, 16 aa, Artificial Sequence
  Synthetically generated peptide
  VARIANT (1)..(16): Xaa = Any Amino Acid
ACXXELCANPXACTGC

SEQ ID NO: 7728 - protein, 17 aa, Artificial Sequence
  Synthetically generated peptide
  VARIANT (1)..(17): Xaa = Any Amino Acid
ACXXELCANPXXACTGC

SEQ ID NO: 7729 - protein, 17 aa, Artificial Sequence
  Synthetically generated peptide
  VARIANT (1)..(17): Xaa = Any Amino Acid
ACXXELCANPXAXCTGC

SEQ ID NO: 7730 - protein, 17 aa, Artificial Sequence
  Synthetically generated peptide
  VARIANT (1)..(17): Xaa = Any Amino Acid
ACXXELCANPXACXTGC

SEQ ID NO: 7731 - protein, 17 aa, Artificial Sequence
  Synthetically generated peptide
  VARIANT (1)..(17): Xaa = Any Amino Acid
ACXXELCANPXACTXGC

SEQ ID NO: 7732 - protein, 17 aa, Artificial Sequence
  Synthetically generated peptide
  VARIANT (1)..(17): Xaa = Any Amino Acid
ACXXELCANPXACTGXC

SEQ ID NO: 7733 - protein, 16 aa, Artificial Sequence
  Synthetically generated peptide
  VARIANT (1)..(16): Xaa = Any Amino Acid
ACXXELCANPAXCTGC

SEQ ID NO: 7734 - protein, 17 aa, Artificial Sequence
  Synthetically generated peptide
  VARIANT (1)..(17): Xaa = Any Amino Acid
ACXXELCANPAXXCTGC

SEQ ID NO: 7735 - protein, 17 aa, Artificial Sequence
  Synthetically generated peptide
  VARIANT (1)..(17): Xaa = Any Amino Acid
ACXXELCANPAXCXTGC

SEQ ID NO: 7736 - protein, 17 aa, Artificial Sequence
  Synthetically generated peptide
  VARIANT (1)..(17): Xaa = Any Amino Acid
ACXXELCANPAXCTXGC

SEQ ID NO: 7737 - protein, 17 aa, Artificial Sequence
  Synthetically generated peptide
  VARIANT (1)..(17): Xaa = Any Amino Acid
ACXXELCANPAXCTGXC

SEQ ID NO: 7738 - protein, 16 aa, Artificial Sequence
  Synthetically generated peptide
  VARIANT (1)..(16): Xaa = Any Amino Acid
ACXXELCANPACXTGC

SEQ ID NO: 7739 - protein, 17 aa, Artificial Sequence
  Synthetically generated peptide
  VARIANT (1)..(17): Xaa = Any Amino Acid
ACXXELCANPACXXTGC

SEQ ID NO: 7740 - protein, 17 aa, Artificial Sequence
  Synthetically generated peptide
  VARIANT (1)..(17): Xaa = Any Amino Acid
ACXXELCANPACXTXGC

SEQ ID NO: 7741 - protein, 17 aa, Artificial Sequence
  Synthetically generated peptide
  VARIANT (1)..(17): Xaa = Any Amino Acid
ACXXELCANPACXTGXC

SEQ ID NO: 7742 - protein, 16 aa, Artificial Sequence
  Synthetically generated peptide
  VARIANT (1)..(16): Xaa = Any Amino Acid
ACXXELCANPACTXGC

SEQ ID NO: 7743 - protein, 17 aa, Artificial Sequence
  Synthetically generated peptide
  VARIANT (1)..(17): Xaa = Any Amino Acid
ACXXELCANPACTXXGC

SEQ ID NO: 7744 - protein, 17 aa, Artificial Sequence
  Synthetically generated peptide
  VARIANT (1)..(17): Xaa = Any Amino Acid
ACXXELCANPACTXGXC

SEQ ID NO: 7745 - protein, 16 aa, Artificial Sequence
  Synthetically generated peptide
  VARIANT (1)..(16): Xaa = Any Amino Acid
ACXXELCANPACTGXC

SEQ ID NO: 7746 - protein, 17 aa, Artificial Sequence
  Synthetically generated peptide
  VARIANT (1)..(17): Xaa = Any Amino Acid
ACXXELCANPACTGXXC

SEQ ID NO: 7747 - protein, 15 aa, Artificial Sequence
  Synthetically generated peptide
  VARIANT (1)..(15): Xaa = Any Amino Acid
ACXEXLCANPACTGC

SEQ ID NO: 7748 - protein, 16 aa, Artificial Sequence
  Synthetically generated peptide
  VARIANT (1)..(16): Xaa = Any Amino Acid
ACXEXXLCANPACTGC

SEQ ID NO: 7749 - protein, 17 aa, Artificial Sequence
  Synthetically generated peptide
  VARIANT (1)..(17): Xaa = Any Amino Acid
ACXEXXXLCANPACTGC

SEQ ID NO: 7750 - protein, 17 aa, Artificial Sequence
  Synthetically generated peptide
  VARIANT (1)..(17): Xaa = Any Amino Acid
ACXEXXLXCANPACTGC

SEQ ID NO: 7751 - protein, 17 aa, Artificial Sequence
  Synthetically generated peptide
  VARIANT (1)..(17): Xaa = Any Amino Acid
ACXEXXLCAXNPACTGC

SEQ ID NO: 7752 - protein, 17 aa, Artificial Sequence
  Synthetically generated peptide
  VARIANT (1)..(17): Xaa = Any Amino Acid
ACXEXXLCANXPACTGC

SEQ ID NO: 7753 - protein, 17 aa, Artificial Sequence
  Synthetically generated peptide
  VARIANT (1)..(17): Xaa = Any Amino Acid
ACXEXXLCANPXACTGC

SEQ ID NO: 7754 - protein, 17 aa, Artificial Sequence
  Synthetically generated peptide
  VARIANT (1)..(17): Xaa = Any Amino Acid
ACXEXXLCANPAXCTGC

SEQ ID NO: 7755 - protein, 17 aa, Artificial Sequence
  Synthetically generated peptide
  VARIANT (1)..(17): Xaa = Any Amino Acid
ACXEXXLCANPACXTGC

SEQ ID NO: 7756 - protein, 17 aa, Artificial Sequence
  Synthetically generated peptide
  VARIANT (1)..(17): Xaa = Any Amino Acid
ACXEXXLCANPACTXGC

SEQ ID NO: 7757 - protein, 17 aa, Artificial Sequence
  Synthetically generated peptide
  VARIANT (1)..(17): Xaa = Any Amino Acid
ACXEXXLCANPACTGXC

SEQ ID NO: 7758 - protein, 16 aa, Artificial Sequence
  Synthetically generated peptide
  VARIANT (1)..(16): Xaa = Any Amino Acid
ACXEXLXCANPACTGC

SEQ ID NO: 7759 - protein, 17 aa, Artificial Sequence
  Synthetically generated peptide
  VARIANT (1)..(17): Xaa = Any Amino Acid
ACXEXLXXCANPACTGC

SEQ ID NO: 7760 - protein, 17 aa, Artificial Sequence
  Synthetically generated peptide
  VARIANT (1)..(17): Xaa = Any Amino Acid
ACXEXLXCAXNPACTGC

SEQ ID NO: 7761 - protein, 17 aa, Artificial Sequence
  Synthetically generated peptide
  VARIANT (1)..(17): Xaa = Any Amino Acid
ACXEXLXCANXPACTGC

SEQ ID NO: 7762 - protein, 17 aa, Artificial Sequence
  Synthetically generated peptide
  VARIANT (1)..(17): Xaa = Any Amino Acid
ACXEXLXCANPXACTGC

SEQ ID NO: 7763 - protein, 17 aa, Artificial Sequence
  Synthetically generated peptide
  VARIANT (1)..(17): Xaa = Any Amino Acid
ACXEXLXCANPAXCTGC

SEQ ID NO: 7764 - protein, 17 aa, Artificial Sequence
  Synthetically generated peptide
  VARIANT (1)..(17): Xaa = Any Amino Acid
ACXEXLXCANPACXTGC

SEQ ID NO: 7765 - protein, 17 aa, Artificial Sequence
  Synthetically generated peptide
  VARIANT (1)..(17): Xaa = Any Amino Acid
ACXEXLXCANPACTXGC

SEQ ID NO: 7766 - protein, 17 aa, Artificial Sequence
  Synthetically generated peptide
  VARIANT (1)..(17): Xaa = Any Amino Acid
ACXEXLXCANPACTGXC

SEQ ID NO: 7767 - protein, 16 aa, Artificial Sequence
  Synthetically generated peptide
  VARIANT (1)..(16): Xaa = Any Amino Acid
ACXEXLCAXNPACTGC

SEQ ID NO: 7768 - protein, 17 aa, Artificial Sequence
  Synthetically generated peptide
  VARIANT (1)..(17): Xaa = Any Amino Acid
ACXEXLCAXXNPACTGC

SEQ ID NO: 7769 - protein, 17 aa, Artificial Sequence
  Synthetically generated peptide
  VARIANT (1)..(17): Xaa = Any Amino Acid
ACXEXLCAXNXPACTGC

SEQ ID NO: 7770 - protein, 17 aa, Artificial Sequence
  Synthetically generated peptide
  VARIANT (1)..(17): Xaa = Any Amino Acid
ACXEXLCAXNPXACTGC

SEQ ID NO: 7771 - protein, 17 aa, Artificial Sequence
  Synthetically generated peptide
  VARIANT (1)..(17): Xaa = Any Amino Acid
ACXEXLCAXNPAXCTGC

SEQ ID NO: 7772 - protein, 17 aa, Artificial Sequence
  Synthetically generated peptide
  VARIANT (1)..(17): Xaa = Any Amino Acid
ACXEXLCAXNPACXTGC

SEQ ID NO: 7773 - protein, 17 aa, Artificial Sequence
  Synthetically generated peptide
  VARIANT (1)..(17): Xaa = Any Amino Acid
ACXEXLCAXNPACTXGC

SEQ ID NO: 7774 - protein, 17 aa, Artificial Sequence
  Synthetically generated peptide
  VARIANT (1)..(17): Xaa = Any Amino Acid
ACXEXLCAXNPACTGXC

SEQ ID NO: 7775 - protein, 16 aa, Artificial Sequence
  Synthetically generated peptide
  VARIANT (1)..(16): Xaa = Any Amino Acid
ACXEXLCANXPACTGC

SEQ ID NO: 7776 - protein, 17 aa, Artificial Sequence
  Synthetically generated peptide
  VARIANT (1)..(17): Xaa = Any Amino Acid
ACXEXLCANXXPACTGC

SEQ ID NO: 7777 - protein, 17 aa, Artificial Sequence
  Synthetically generated peptide
  VARIANT (1)..(17): Xaa = Any Amino Acid
ACXEXLCANXPXACTGC

SEQ ID NO: 7778 - protein, 17 aa, Artificial Sequence
  Synthetically generated peptide
  VARIANT (1)..(17): Xaa = Any Amino Acid
ACXEXLCANXPAXCTGC

SEQ ID NO: 7779 - protein, 17 aa, Artificial Sequence
  Synthetically generated peptide
  VARIANT (1)..(17): Xaa = Any Amino Acid
ACXEXLCANXPACXTGC

SEQ ID NO: 7780 - protein, 17 aa, Artificial Sequence
  Synthetically generated peptide
  VARIANT (1)..(17): Xaa = Any Amino Acid
ACXEXLCANXPACTXGC

SEQ ID NO: 7781 - protein, 17 aa, Artificial Sequence
  Synthetically generated peptide
  VARIANT (1)..(17): Xaa = Any Amino Acid
ACXEXLCANXPACTGXC

SEQ ID NO: 7782 - protein, 16 aa, Artificial Sequence
  Synthetically generated peptide
  VARIANT (1)..(16): Xaa = Any Amino Acid
ACXEXLCANPXACTGC

SEQ ID NO: 7783 - protein, 17 aa, Artificial Sequence
  Synthetically generated peptide
  VARIANT (1)..(17): Xaa = Any Amino Acid
ACXEXLCANPXXACTGC

SEQ ID NO: 7784 - protein, 17 aa, Artificial Sequence
  Synthetically generated peptide
  VARIANT (1)..(17): Xaa = Any Amino Acid
ACXEXLCANPXAXCTGC

SEQ ID NO: 7785 - protein, 17 aa, Artificial Sequence
  Synthetically generated peptide
  VARIANT (1)..(17): Xaa = Any Amino Acid
ACXEXLCANPXACXTGC

SEQ ID NO: 7786 - protein, 17 aa, Artificial Sequence
  Synthetically generated peptide
  VARIANT (1)..(17): Xaa = Any Amino Acid
ACXEXLCANPXACTXGC

SEQ ID NO: 7787 - protein, 17 aa, Artificial Sequence
  Synthetically generated peptide
  VARIANT (1)..(17): Xaa = Any Amino Acid
ACXEXLCANPXACTGXC

SEQ ID NO: 7788 - protein, 16 aa, Artificial Sequence
  Synthetically generated peptide
  VARIANT (1)..(16): Xaa = Any Amino Acid
ACXEXLCANPAXCTGC

SEQ ID NO: 7789 - protein, 17 aa, Artificial Sequence
  Synthetically generated peptide
  VARIANT (1)..(17): Xaa = Any Amino Acid
ACXEXLCANPAXXCTGC

SEQ ID NO: 7790 - protein, 17 aa, Artificial Sequence
  Synthetically generated peptide
  VARIANT (1)..(17): Xaa = Any Amino Acid
ACXEXLCANPAXCXTGC

SEQ ID NO: 7791 - protein, 17 aa, Artificial Sequence
  Synthetically generated peptide
  VARIANT (1)..(17): Xaa = Any Amino Acid
ACXEXLCANPAXCTXGC

SEQ ID NO: 7792 - protein, 17 aa, Artificial Sequence
  Synthetically generated peptide
  VARIANT (1)..(17): Xaa = Any Amino Acid
ACXEXLCANPAXCTGXC

SEQ ID NO: 7793 - protein, 16 aa, Artificial Sequence
  Synthetically generated peptide
  VARIANT (1)..(16): Xaa = Any Amino Acid
ACXEXLCANPACXTGC

SEQ ID NO: 7794 - protein, 17 aa, Artificial Sequence
  Synthetically generated peptide
  VARIANT (1)..(17): Xaa = Any Amino Acid
ACXEXLCANPACXXTGC

SEQ ID NO: 7795 - protein, 17 aa, Artificial Sequence
  Synthetically generated peptide
  VARIANT (1)..(17): Xaa = Any Amino Acid
ACXEXLCANPACXTXGC

SEQ ID NO: 7796 - protein, 17 aa, Artificial Sequence
  Synthetically generated peptide
  VARIANT (1)..(17): Xaa = Any Amino Acid
ACXEXLCANPACXTGXC

SEQ ID NO: 7797 - protein, 16 aa, Artificial Sequence
  Synthetically generated peptide
  VARIANT (1)..(16): Xaa = Any Amino Acid
ACXEXLCANPACTXGC

SEQ ID NO: 7798 - protein, 17 aa, Artificial Sequence
  Synthetically generated peptide
  VARIANT (1)..(17): Xaa = Any Amino Acid
ACXEXLCANPACTXXGC

SEQ ID NO: 7799 - protein, 17 aa, Artificial Sequence
  Synthetically generated peptide
  VARIANT (1)..(17): Xaa = Any Amino Acid
ACXEXLCANPACTXGXC

SEQ ID NO: 7800 - protein, 16 aa, Artificial Sequence
  Synthetically generated peptide
  VARIANT (1)..(16): Xaa = Any Amino Acid
ACXEXLCANPACTGXC

SEQ ID NO: 7801 - protein, 17 aa, Artificial Sequence
  Synthetically generated peptide
  VARIANT (1)..(17): Xaa = Any Amino Acid
ACXEXLCANPACTGXXC

SEQ ID NO: 7802 - protein, 15 aa, Artificial Sequence
  Synthetically generated peptide
  VARIANT (1)..(15): Xaa = Any Amino Acid
ACXELXCANPACTGC

SEQ ID NO: 7803 - protein, 16 aa, Artificial Sequence
  Synthetically generated peptide
  VARIANT (1)..(16): Xaa = Any Amino Acid
ACXELXXCANPACTGC

SEQ ID NO: 7804 - protein, 17 aa, Artificial Sequence
  Synthetically generated peptide
  VARIANT (1)..(17): Xaa = Any Amino Acid
ACXELXXXCANPACTGC

SEQ ID NO: 7805 - protein, 17 aa, Artificial Sequence
  Synthetically generated peptide
  VARIANT (1)..(17): Xaa = Any Amino Acid
ACXELXXCAXNPACTGC

SEQ ID NO: 7806 - protein, 17 aa, Artificial Sequence
  Synthetically generated peptide
  VARIANT (1)..(17): Xaa = Any Amino Acid
ACXELXXCANXPACTGC

SEQ ID NO: 7807 - protein, 17 aa, Artificial Sequence
  Synthetically generated peptide
  VARIANT (1)..(17): Xaa = Any Amino Acid
ACXELXXCANPXACTGC

SEQ ID NO: 7808 - protein, 17 aa, Artificial Sequence
  Synthetically generated peptide
  VARIANT (1)..(17): Xaa = Any Amino Acid
ACXELXXCANPAXCTGC

SEQ ID NO: 7809 - protein, 17 aa, Artificial Sequence
  Synthetically generated peptide
  VARIANT (1)..(17): Xaa = Any Amino Acid
ACXELXXCANPACXTGC

SEQ ID NO: 7810 - protein, 17 aa, Artificial Sequence
  Synthetically generated peptide
  VARIANT (1)..(17): Xaa = Any Amino Acid
ACXELXXCANPACTXGC

SEQ ID NO: 7811 - protein, 17 aa, Artificial Sequence
  Synthetically generated peptide
  VARIANT (1)..(17): Xaa = Any Amino Acid
ACXELXXCANPACTGXC

SEQ ID NO: 7812 - protein, 16 aa, Artificial Sequence
  Synthetically generated peptide
  VARIANT (1)..(16): Xaa = Any Amino Acid
ACXELXCAXNPACTGC

SEQ ID NO: 7813 - protein, 17 aa, Artificial Sequence
  Synthetically generated peptide
  VARIANT (1)..(17): Xaa = Any Amino Acid
ACXELXCAXXNPACTGC

SEQ ID NO: 7814 - protein, 17 aa, Artificial Sequence
  Synthetically generated peptide
  VARIANT (1)..(17): Xaa = Any Amino Acid
ACXELXCAXNXPACTGC

SEQ ID NO: 7815 - protein, 17 aa, Artificial Sequence
  Synthetically generated peptide
  VARIANT (1)..(17): Xaa = Any Amino Acid
ACXELXCAXNPXACTGC

SEQ ID NO: 7816 - protein, 17 aa, Artificial Sequence
  Synthetically generated peptide
  VARIANT (1)..(17): Xaa = Any Amino Acid
ACXELXCAXNPAXCTGC

SEQ ID NO: 7817 - protein, 17 aa, Artificial Sequence
  Synthetically generated peptide
  VARIANT (1)..(17): Xaa = Any Amino Acid
ACXELXCAXNPACXTGC

SEQ ID NO: 7818 - protein, 17 aa, Artificial Sequence
  Synthetically generated peptide
  VARIANT (1)..(17): Xaa = Any Amino Acid
ACXELXCAXNPACTXGC

SEQ ID NO: 7819 - protein, 17 aa, Artificial Sequence
  Synthetically generated peptide
  VARIANT (1)..(17): Xaa = Any Amino Acid
ACXELXCAXNPACTGXC

SEQ ID NO: 7820 - protein, 16 aa, Artificial Sequence
  Synthetically generated peptide
  VARIANT (1)..(16): Xaa = Any Amino Acid
ACXELXCANXPACTGC

SEQ ID NO: 7821 - protein, 17 aa, Artificial Sequence
  Synthetically generated peptide
  VARIANT (1)..(17): Xaa = Any Amino Acid
ACXELXCANXXPACTGC

SEQ ID NO: 7822 - protein, 17 aa, Artificial Sequence
  Synthetically generated peptide
  VARIANT (1)..(17): Xaa = Any Amino Acid
ACXELXCANXPXACTGC

SEQ ID NO: 7823 - protein, 17 aa, Artificial Sequence
  Synthetically generated peptide
  VARIANT (1)..(17): Xaa = Any Amino Acid
ACXELXCANXPAXCTGC

SEQ ID NO: 7824 - protein, 17 aa, Artificial Sequence
  Synthetically generated peptide
  VARIANT (1)..(17): Xaa = Any Amino Acid
ACXELXCANXPACXTGC

SEQ ID NO: 7825 - protein, 17 aa, Artificial Sequence
  Synthetically generated peptide
  VARIANT (1)..(17): Xaa = Any Amino Acid
ACXELXCANXPACTXGC

SEQ ID NO: 7826 - protein, 17 aa, Artificial Sequence
  Synthetically generated peptide
  VARIANT (1)..(17): Xaa = Any Amino Acid
ACXELXCANXPACTGXC

SEQ ID NO: 7827 - protein, 16 aa, Artificial Sequence
  Synthetically generated peptide
  VARIANT (1)..(16): Xaa = Any Amino Acid
ACXELXCANPXACTGC

SEQ ID NO: 7828 - protein, 17 aa, Artificial Sequence
  Synthetically generated peptide
  VARIANT (1)..(17): Xaa = Any Amino Acid
ACXELXCANPXXACTGC

SEQ ID NO: 7829 - protein, 17 aa, Artificial Sequence
  Synthetically generated peptide
  VARIANT (1)..(17): Xaa = Any Amino Acid
ACXELXCANPXAXCTGC

SEQ ID NO: 7830 - protein, 17 aa, Artificial Sequence
  Synthetically generated peptide
  VARIANT (1)..(17): Xaa = Any Amino Acid
ACXELXCANPXACXTGC

SEQ ID NO: 7831 - protein, 17 aa, Artificial Sequence
  Synthetically generated peptide
  VARIANT (1)..(17): Xaa = Any Amino Acid
ACXELXCANPXACTXGC

SEQ ID NO: 7832 - protein, 17 aa, Artificial Sequence
  Synthetically generated peptide
  VARIANT (1)..(17): Xaa = Any Amino Acid
ACXELXCANPXACTGXC

SEQ ID NO: 7833 - protein, 16 aa, Artificial Sequence
  Synthetically generated peptide
  VARIANT (1)..(16): Xaa = Any Amino Acid
ACXELXCANPAXCTGC

SEQ ID NO: 7834 - protein, 17 aa, Artificial Sequence
  Synthetically generated peptide
  VARIANT (1)..(17): Xaa = Any Amino Acid
ACXELXCANPAXXCTGC

SEQ ID NO: 7835 - protein, 17 aa, Artificial Sequence
  Synthetically generated peptide
  VARIANT (1)..(17): Xaa = Any Amino Acid
ACXELXCANPAXCXTGC

SEQ ID NO: 7836 - protein, 17 aa, Artificial Sequence
  Synthetically generated peptide
  VARIANT (1)..(17): Xaa = Any Amino Acid
ACXELXCANPAXCTXGC

SEQ ID NO: 7837 - protein, 17 aa, Artificial Sequence
  Synthetically generated peptide
  VARIANT (1)..(17): Xaa = Any Amino Acid
ACXELXCANPAXCTGXC

SEQ ID NO: 7838 - protein, 16 aa, Artificial Sequence
  Synthetically generated peptide
  VARIANT (1)..(16): Xaa = Any Amino Acid
ACXELXCANPACXTGC

SEQ ID NO: 7839 - protein, 17 aa, Artificial Sequence
  Synthetically generated peptide
  VARIANT (1)..(17): Xaa = Any Amino Acid
ACXELXCANPACXXTGC

SEQ ID NO: 7840 - protein, 17 aa, Artificial Sequence
  Synthetically generated peptide
  VARIANT (1)..(17): Xaa = Any Amino Acid
ACXELXCANPACXTXGC

SEQ ID NO: 7841 - protein, 17 aa, Artificial Sequence
  Synthetically generated peptide
  VARIANT (1)..(17): Xaa = Any Amino Acid
ACXELXCANPACXTGXC

SEQ ID NO: 7842 - protein, 16 aa, Artificial Sequence
  Synthetically generated peptide
  VARIANT (1)..(16): Xaa = Any Amino Acid
ACXELXCANPACTXGC

SEQ ID NO: 7843 - protein, 17 aa, Artificial Sequence
  Synthetically generated peptide
  VARIANT (1)..(17): Xaa = Any Amino Acid
ACXELXCANPACTXXGC

SEQ ID NO: 7844 - protein, 17 aa, Artificial Sequence
  Synthetically generated peptide
  VARIANT (1)..(17): Xaa = Any Amino Acid
ACXELXCANPACTXGXC

SEQ ID NO: 7845 - protein, 16 aa, Artificial Sequence
  Synthetically generated peptide
  VARIANT (1)..(16): Xaa = Any Amino Acid
ACXELXCANPACTGXC

SEQ ID NO: 7846 - protein, 17 aa, Artificial Sequence
  Synthetically generated peptide
  VARIANT (1)..(17): Xaa = Any Amino Acid
ACXELXCANPACTGXXC

SEQ ID NO: 7847 - protein, 15 aa, Artificial Sequence
  Synthetically generated peptide
  VARIANT (1)..(15): Xaa = Any Amino Acid
ACXELCAXNPACTGC

SEQ ID NO: 7848 - protein, 16 aa, Artificial Sequence
  Synthetically generated peptide
  VARIANT (1)..(16): Xaa = Any Amino Acid
ACXELCAXXNPACTGC

SEQ ID NO: 7849 - protein, 17 aa, Artificial Sequence
  Synthetically generated peptide
  VARIANT (1)..(17): Xaa = Any Amino Acid
ACXELCAXXXNPACTGC

SEQ ID NO: 7850 - protein, 17 aa, Artificial Sequence
  Synthetically generated peptide
  VARIANT (1)..(17): Xaa = Any Amino Acid
ACXELCAXXNXPACTGC

SEQ ID NO: 7851 - protein, 17 aa, Artificial Sequence
  Synthetically generated peptide
  VARIANT (1)..(17): Xaa = Any Amino Acid
ACXELCAXXNPXACTGC

SEQ ID NO: 7852 - protein, 17 aa, Artificial Sequence
  Synthetically generated peptide
  VARIANT (1)..(17): Xaa = Any Amino Acid
ACXELCAXXNPAXCTGC

SEQ ID NO: 7853 - protein, 17 aa, Artificial Sequence
  Synthetically generated peptide
  VARIANT (1)..(17): Xaa = Any Amino Acid
ACXELCAXXNPACXTGC

SEQ ID NO: 7854 - protein, 17 aa, Artificial Sequence
  Synthetically generated peptide
  VARIANT (1)..(17): Xaa = Any Amino Acid
ACXELCAXXNPACTXGC

SEQ ID NO: 7855 - protein, 17 aa, Artificial Sequence
  Synthetically generated peptide
  VARIANT (1)..(17): Xaa = Any Amino Acid
ACXELCAXXNPACTGXC

SEQ ID NO: 7856 - protein, 16 aa, Artificial Sequence
  Synthetically generated peptide
  VARIANT (1)..(16): Xaa = Any Amino Acid
ACXELCAXNXPACTGC

SEQ ID NO: 7857 - protein, 17 aa, Artificial Sequence
  Synthetically generated peptide
  VARIANT (1)..(17): Xaa = Any Amino Acid
ACXELCAXNXXPACTGC

SEQ ID NO: 7858 - protein, 17 aa, Artificial Sequence
  Synthetically generated peptide
  VARIANT (1)..(17): Xaa = Any Amino Acid
ACXELCAXNXPXACTGC

SEQ ID NO: 7859 - protein, 17 aa, Artificial Sequence
  Synthetically generated peptide
  VARIANT (1)..(17): Xaa = Any Amino Acid
ACXELCAXNXPAXCTGC

SEQ ID NO: 7860 - protein, 17 aa, Artificial Sequence
  Synthetically generated peptide
  VARIANT (1)..(17): Xaa = Any Amino Acid
ACXELCAXNXPACXTGC

SEQ ID NO: 7861 - protein, 17 aa, Artificial Sequence
  Synthetically generated peptide
  VARIANT (1)..(17): Xaa = Any Amino Acid
ACXELCAXNXPACTXGC

SEQ ID NO: 7862 - protein, 17 aa, Artificial Sequence
  Synthetically generated peptide
  VARIANT (1)..(17): Xaa = Any Amino Acid
ACXELCAXNXPACTGXC

SEQ ID NO: 7863 - protein, 16 aa, Artificial Sequence
  Synthetically generated peptide
  VARIANT (1)..(16): Xaa = Any Amino Acid
ACXELCAXNPXACTGC

SEQ ID NO: 7864 - protein, 17 aa, Artificial Sequence
  Synthetically generated peptide
  VARIANT (1)..(17): Xaa = Any Amino Acid
ACXELCAXNPXXACTGC

SEQ ID NO: 7865 - protein, 17 aa, Artificial Sequence
  Synthetically generated peptide
  VARIANT (1)..(17): Xaa = Any Amino Acid
ACXELCAXNPXAXCTGC

SEQ ID NO: 7866 - protein, 17 aa, Artificial Sequence
  Synthetically generated peptide
  VARIANT (1)..(17): Xaa = Any Amino Acid
ACXELCAXNPXACXTGC

SEQ ID NO: 7867 - protein, 17 aa, Artificial Sequence
  Synthetically generated peptide
  VARIANT (1)..(17): Xaa = Any Amino Acid
ACXELCAXNPXACTXGC

SEQ ID NO: 7868 - protein, 17 aa, Artificial Sequence
  Synthetically generated peptide
  VARIANT (1)..(17): Xaa = Any Amino Acid
ACXELCAXNPXACTGXC

SEQ ID NO: 7869 - protein, 16 aa, Artificial Sequence
  Synthetically generated peptide
  VARIANT (1)..(16): Xaa = Any Amino Acid
ACXELCAXNPAXCTGC

SEQ ID NO: 7870 - protein, 17 aa, Artificial Sequence
  Synthetically generated peptide
  VARIANT (1)..(17): Xaa = Any Amino Acid
ACXELCAXNPAXXCTGC

SEQ ID NO: 7871 - protein, 17 aa, Artificial Sequence
  Synthetically generated peptide
  VARIANT (1)..(17): Xaa = Any Amino Acid
ACXELCAXNPAXCXTGC

SEQ ID NO: 7872 - protein, 17 aa, Artificial Sequence
  Synthetically generated peptide
  VARIANT (1)..(17): Xaa = Any Amino Acid
ACXELCAXNPAXCTXGC

SEQ ID NO: 7873 - protein, 17 aa, Artificial Sequence
  Synthetically generated peptide
  VARIANT (1)..(17): Xaa = Any Amino Acid
ACXELCAXNPAXCTGXC

SEQ ID NO: 7874 - protein, 16 aa, Artificial Sequence
  Synthetically generated peptide
  VARIANT (1)..(16): Xaa = Any Amino Acid
ACXELCAXNPACXTGC

SEQ ID NO: 7875 - protein, 17 aa, Artificial Sequence
  Synthetically generated peptide
  VARIANT (1)..(17): Xaa = Any Amino Acid
ACXELCAXNPACXXTGC

SEQ ID NO: 7876 - protein, 17 aa, Artificial Sequence
  Synthetically generated peptide
  VARIANT (1)..(17): Xaa = Any Amino Acid
ACXELCAXNPACXTXGC

SEQ ID NO: 7877 - protein, 17 aa, Artificial Sequence
  Synthetically generated peptide
  VARIANT (1)..(17): Xaa = Any Amino Acid
ACXELCAXNPACXTGXC

SEQ ID NO: 7878 - protein, 16 aa, Artificial Sequence
  Synthetically generated peptide
  VARIANT (1)..(16): Xaa = Any Amino Acid
ACXELCAXNPACTXGC

SEQ ID NO: 7879 - protein, 17 aa, Artificial Sequence
  Synthetically generated peptide
  VARIANT (1)..(17): Xaa = Any Amino Acid
ACXELCAXNPACTXXGC

SEQ ID NO: 7880 - protein, 17 aa, Artificial Sequence
  Synthetically generated peptide
  VARIANT (1)..(17): Xaa = Any Amino Acid
ACXELCAXNPACTXGXC

SEQ ID NO: 7881 - protein, 16 aa, Artificial Sequence
  Synthetically generated peptide
  VARIANT (1)..(16): Xaa = Any Amino Acid
ACXELCAXNPACTGXC

SEQ ID NO: 7882 - protein, 17 aa, Artificial Sequence
  Synthetically generated peptide
  VARIANT (1)..(17): Xaa = Any Amino Acid
ACXELCAXNPACTGXXC

SEQ ID NO: 7883 - protein, 15 aa, Artificial Sequence
  Synthetically generated peptide
  VARIANT (1)..(15): Xaa = Any Amino Acid
ACXELCANXPACTGC

SEQ ID NO: 7884 - protein, 16 aa, Artificial Sequence
  Synthetically generated peptide
  VARIANT (1)..(16): Xaa = Any Amino Acid
ACXELCANXXPACTGC

SEQ ID NO: 7885 - protein, 17 aa, Artificial Sequence
  Synthetically generated peptide
  VARIANT (1)..(17): Xaa = Any Amino Acid
ACXELCANXXXPACTGC

SEQ ID NO: 7886 - protein, 17 aa, Artificial Sequence
  Synthetically generated peptide
  VARIANT (1)..(17): Xaa = Any Amino Acid
ACXELCANXXPXACTGC

SEQ ID NO: 7887 - protein, 17 aa, Artificial Sequence
  Synthetically generated peptide
  VARIANT (1)..(17): Xaa = Any Amino Acid
ACXELCANXXPAXCTGC

SEQ ID NO: 7888 - protein, 17 aa, Artificial Sequence
  Synthetically generated peptide
  VARIANT (1)..(17): Xaa = Any Amino Acid
ACXELCANXXPACXTGC

SEQ ID NO: 7889 - protein, 17 aa, Artificial Sequence
  Synthetically generated peptide
  VARIANT (1)..(17): Xaa = Any Amino Acid
ACXELCANXXPACTXGC

SEQ ID NO: 7890 - protein, 17 aa, Artificial Sequence
  Synthetically generated peptide
  VARIANT (1)..(17): Xaa = Any Amino Acid
ACXELCANXXPACTGXC

SEQ ID NO: 7891 - protein, 16 aa, Artificial Sequence
  Synthetically generated peptide
  VARIANT (1)..(16): Xaa = Any Amino Acid
ACXELCANXPXACTGC

SEQ ID NO: 7892 - protein, 17 aa, Artificial Sequence
  Synthetically generated peptide
  VARIANT (1)..(17): Xaa = Any Amino Acid
ACXELCANXPXXACTGC

SEQ ID NO: 7893 - protein, 17 aa, Artificial Sequence
  Synthetically generated peptide
  VARIANT (1)..(17): Xaa = Any Amino Acid
ACXELCANXPXAXCTGC

SEQ ID NO: 7894 - protein, 17 aa, Artificial Sequence
  Synthetically generated peptide
  VARIANT (1)..(17): Xaa = Any Amino Acid
ACXELCANXPXACXTGC

SEQ ID NO: 7895 - protein, 17 aa, Artificial Sequence
  Synthetically generated peptide
  VARIANT (1)..(17): Xaa = Any Amino Acid
ACXELCANXPXACTXGC

SEQ ID NO: 7896 - protein, 17 aa, Artificial Sequence
  Synthetically generated peptide
  VARIANT (1)..(17): Xaa = Any Amino Acid
ACXELCANXPXACTGXC

SEQ ID NO: 7897 - protein, 16 aa, Artificial Sequence
  Synthetically generated peptide
  VARIANT (1)..(16): Xaa = Any Amino Acid
ACXELCANXPAXCTGC

SEQ ID NO: 7898 - protein, 17 aa, Artificial Sequence
  Synthetically generated peptide
  VARIANT (1)..(17): Xaa = Any Amino Acid
ACXELCANXPAXXCTGC

SEQ ID NO: 7899 - protein, 17 aa, Artificial Sequence
  Synthetically generated peptide
  VARIANT (1)..(17): Xaa = Any Amino Acid
ACXELCANXPAXCXTGC

SEQ ID NO: 7900 - protein, 17 aa, Artificial Sequence
  Synthetically generated peptide
  VARIANT (1)..(17): Xaa = Any Amino Acid
ACXELCANXPAXCTXGC

SEQ ID NO: 7901 - protein, 17 aa, Artificial Sequence
  Synthetically generated peptide
  VARIANT (1)..(17): Xaa = Any Amino Acid
ACXELCANXPAXCTGXC

SEQ ID NO: 7902 - protein, 16 aa, Artificial Sequence
  Synthetically generated peptide
  VARIANT (1)..(16): Xaa = Any Amino Acid
ACXELCANXPACXTGC

SEQ ID NO: 7903 - protein, 17 aa, Artificial Sequence
  Synthetically generated peptide
  VARIANT (1)..(17): Xaa = Any Amino Acid
ACXELCANXPACXXTGC

SEQ ID NO: 7904 - protein, 17 aa, Artificial Sequence
  Synthetically generated peptide
  VARIANT (1)..(17): Xaa = Any Amino Acid
ACXELCANXPACXTXGC

SEQ ID NO: 7905 - protein, 17 aa, Artificial Sequence
  Synthetically generated peptide
  VARIANT (1)..(17): Xaa = Any Amino Acid
ACXELCANXPACXTGXC

SEQ ID NO: 7906 - protein, 16 aa, Artificial Sequence
  Synthetically generated peptide
  VARIANT (1)..(16): Xaa = Any Amino Acid
ACXELCANXPACTXGC

SEQ ID NO: 7907 - protein, 17 aa, Artificial Sequence
  Synthetically generated peptide
  VARIANT (1)..(17): Xaa = Any Amino Acid
ACXELCANXPACTXXGC

SEQ ID NO: 7908 - protein, 17 aa, Artificial Sequence
  Synthetically generated peptide
  VARIANT (1)..(17): Xaa = Any Amino Acid
ACXELCANXPACTXGXC

SEQ ID NO: 7909 - protein, 16 aa, Artificial Sequence
  Synthetically generated peptide
  VARIANT (1)..(16): Xaa = Any Amino Acid
ACXELCANXPACTGXC

SEQ ID NO: 7910 - protein, 17 aa, Artificial Sequence
  Synthetically generated peptide
  VARIANT (1)..(17): Xaa = Any Amino Acid
ACXELCANXPACTGXXC

SEQ ID NO: 7911 - protein, 15 aa, Artificial Sequence
  Synthetically generated peptide
  VARIANT (1)..(15): Xaa = Any Amino Acid
ACXELCANPXACTGC

SEQ ID NO: 7912 - protein, 16 aa, Artificial Sequence
  Synthetically generated peptide
  VARIANT (1)..(16): Xaa = Any Amino Acid
ACXELCANPXXACTGC

SEQ ID NO: 7913 - protein, 17 aa, Artificial Sequence
  Synthetically generated peptide
  VARIANT (1)..(17): Xaa = Any Amino Acid
ACXELCANPXXXACTGC

SEQ ID NO: 7914 - protein, 17 aa, Artificial Sequence
  Synthetically generated peptide
  VARIANT (1)..(17): Xaa = Any Amino Acid
ACXELCANPXXAXCTGC

SEQ ID NO: 7915 - protein, 17 aa, Artificial Sequence
  Synthetically generated peptide
  VARIANT (1)..(17): Xaa = Any Amino Acid
ACXELCANPXXACXTGC

SEQ ID NO: 7916 - protein, 17 aa, Artificial Sequence
  Synthetically generated peptide
  VARIANT (1)..(17): Xaa = Any Amino Acid
ACXELCANPXXACTXGC

SEQ ID NO: 7917 - protein, 17 aa, Artificial Sequence
  Synthetically generated peptide
  VARIANT (1)..(17): Xaa = Any Amino Acid
ACXELCANPXXACTGXC

SEQ ID NO: 7918 - protein, 16 aa, Artificial Sequence
  Synthetically generated peptide
  VARIANT (1)..(16): Xaa = Any Amino Acid
ACXELCANPXAXCTGC

SEQ ID NO: 7919 - protein, 17 aa, Artificial Sequence
  Synthetically generated peptide
  VARIANT (1)..(17): Xaa = Any Amino Acid
ACXELCANPXAXXCTGC

SEQ ID NO: 7920 - protein, 17 aa, Artificial Sequence
  Synthetically generated peptide
  VARIANT (1)..(17): Xaa = Any Amino Acid
ACXELCANPXAXCXTGC

SEQ ID NO: 7921 - protein, 17 aa, Artificial Sequence
  Synthetically generated peptide
  VARIANT (1)..(17): Xaa = Any Amino Acid
ACXELCANPXAXCTXGC

SEQ ID NO: 7922 - protein, 17 aa, Artificial Sequence
  Synthetically generated peptide
  VARIANT (1)..(17): Xaa = Any Amino Acid
ACXELCANPXAXCTGXC

SEQ ID NO: 7923 - protein, 16 aa, Artificial Sequence
  Synthetically generated peptide
  VARIANT (1)..(16): Xaa = Any Amino Acid
ACXELCANPXACXTGC

SEQ ID NO: 7924 - protein, 17 aa, Artificial Sequence
  Synthetically generated peptide
  VARIANT (1)..(17): Xaa = Any Amino Acid
ACXELCANPXACXXTGC

SEQ ID NO: 7925 - protein, 17 aa, Artificial Sequence
  Synthetically generated peptide
  VARIANT (1)..(17): Xaa = Any Amino Acid
ACXELCANPXACXTXGC

SEQ ID NO: 7926 - protein, 17 aa, Artificial Sequence
  Synthetically generated peptide
  VARIANT (1)..(17): Xaa = Any Amino Acid
ACXELCANPXACXTGXC

SEQ ID NO: 7927 - protein, 16 aa, Artificial Sequence
  Synthetically generated peptide
  VARIANT (1)..(16): Xaa = Any Amino Acid
ACXELCANPXACTXGC

SEQ ID NO: 7928 - protein, 17 aa, Artificial Sequence
  Synthetically generated peptide
  VARIANT (1)..(17): Xaa = Any Amino Acid
ACXELCANPXACTXXGC

SEQ ID NO: 7929 - protein, 17 aa, Artificial Sequence
  Synthetically generated peptide
  VARIANT (1)..(17): Xaa = Any Amino Acid
ACXELCANPXACTXGXC

SEQ ID NO: 7930 - protein, 16 aa, Artificial Sequence
  Synthetically generated peptide
  VARIANT (1)..(16): Xaa = Any Amino Acid
ACXELCANPXACTGXC

SEQ ID NO: 7931 - protein, 17 aa, Artificial Sequence
  Synthetically generated peptide
  VARIANT (1)..(17): Xaa = Any Amino Acid
ACXELCANPXACTGXXC

SEQ ID NO: 7932 - protein, 15 aa, Artificial Sequence
  Synthetically generated peptide
  VARIANT (1)..(15): Xaa = Any Amino Acid
ACXELCANPAXCTGC

SEQ ID NO: 7933 - protein, 16 aa, Artificial Sequence
  Synthetically generated peptide
  VARIANT (1)..(16): Xaa = Any Amino Acid
ACXELCANPAXXCTGC

SEQ ID NO: 7934 - protein, 17 aa, Artificial Sequence
  Synthetically generated peptide
  VARIANT (1)..(17): Xaa = Any Amino Acid
ACXELCANPAXXXCTGC

SEQ ID NO: 7935 - protein, 17 aa, Artificial Sequence
  Synthetically generated peptide
  VARIANT (1)..(17): Xaa = Any Amino Acid
ACXELCANPAXXCXTGC

SEQ ID NO: 7936 - protein, 17 aa, Artificial Sequence
  Synthetically generated peptide
  VARIANT (1)..(17): Xaa = Any Amino Acid
ACXELCANPAXXCTXGC

SEQ ID NO: 7937 - protein, 17 aa, Artificial Sequence
  Synthetically generated peptide
  VARIANT (1)..(17): Xaa = Any Amino Acid
ACXELCANPAXXCTGXC

SEQ ID NO: 7938 - protein, 16 aa, Artificial Sequence
  Synthetically generated peptide
  VARIANT (1)..(16): Xaa = Any Amino Acid
ACXELCANPAXCXTGC

SEQ ID NO: 7939 - protein, 17 aa, Artificial Sequence
  Synthetically generated peptide
  VARIANT (1)..(17): Xaa = Any Amino Acid
ACXELCANPAXCXXTGC

SEQ ID NO: 7940 - protein, 17 aa, Artificial Sequence
  Synthetically generated peptide
  VARIANT (1)..(17): Xaa = Any Amino Acid
ACXELCANPAXCXTXGC

SEQ ID NO: 7941 - protein, 17 aa, Artificial Sequence
  Synthetically generated peptide
  VARIANT (1)..(17): Xaa = Any Amino Acid
ACXELCANPAXCXTGXC

SEQ ID NO: 7942 - protein, 16 aa, Artificial Sequence
  Synthetically generated peptide
  VARIANT (1)..(16): Xaa = Any Amino Acid
ACXELCANPAXCTXGC

SEQ ID NO: 7943 - protein, 17 aa, Artificial Sequence
  Synthetically generated peptide
  VARIANT (1)..(17): Xaa = Any Amino Acid
ACXELCANPAXCTXXGC

SEQ ID NO: 7944 - protein, 17 aa, Artificial Sequence
  Synthetically generated peptide
  VARIANT (1)..(17): Xaa = Any Amino Acid
ACXELCANPAXCTXGXC

SEQ ID NO: 7945 - protein, 16 aa, Artificial Sequence
  Synthetically generated peptide
  VARIANT (1)..(16): Xaa = Any Amino Acid
ACXELCANPAXCTGXC

SEQ ID NO: 7946 - protein, 17 aa, Artificial Sequence
  Synthetically generated peptide
  VARIANT (1)..(17): Xaa = Any Amino Acid
ACXELCANPAXCTGXXC

SEQ ID NO: 7947 - protein, 15 aa, Artificial Sequence
  Synthetically generated peptide
  VARIANT (1)..(15): Xaa = Any Amino Acid
ACXELCANPACXTGC

SEQ ID NO: 7948 - protein, 16 aa, Artificial Sequence
  Synthetically generated peptide
  VARIANT (1)..(16): Xaa = Any Amino Acid
ACXELCANPACXXTGC

SEQ ID NO: 7949 - protein, 17 aa, Artificial Sequence
  Synthetically generated peptide
  VARIANT (1)..(17): Xaa = Any Amino Acid
ACXELCANPACXXXTGC

SEQ ID NO: 7950 - protein, 17 aa, Artificial Sequence
  Synthetically generated peptide
  VARIANT (1)..(17): Xaa = Any Amino Acid
ACXELCANPACXXTXGC

SEQ ID NO: 7951 - protein, 17 aa, Artificial Sequence
  Synthetically generated peptide
  VARIANT (1)..(17): Xaa = Any Amino Acid
ACXELCANPACXXTGXC

SEQ ID NO: 7952 - protein, 16 aa, Artificial Sequence
  Synthetically generated peptide
  VARIANT (1)..(16): Xaa = Any Amino Acid
ACXELCANPACXTXGC

SEQ ID NO: 7953 - protein, 17 aa, Artificial Sequence
  Synthetically generated peptide
  VARIANT (1)..(17): Xaa = Any Amino Acid
ACXELCANPACXTXXGC

SEQ ID NO: 7954 - protein, 17 aa, Artificial Sequence
  Synthetically generated peptide
  VARIANT (1)..(17): Xaa = Any Amino Acid
ACXELCANPACXTXGXC

SEQ ID NO: 7955 - protein, 16 aa, Artificial Sequence
  Synthetically generated peptide
  VARIANT (1)..(16): Xaa = Any Amino Acid
ACXELCANPACXTGXC

SEQ ID NO: 7956 - protein, 17 aa, Artificial Sequence
  Synthetically generated peptide
  VARIANT (1)..(17): Xaa = Any Amino Acid
ACXELCANPACXTGXXC

SEQ ID NO: 7957 - protein, 15 aa, Artificial Sequence
  Synthetically generated peptide
  VARIANT (1)..(15): Xaa = Any Amino Acid
ACXELCANPACTXGC

SEQ ID NO: 7958 - protein, 16 aa, Artificial Sequence
  Synthetically generated peptide
  VARIANT (1)..(16): Xaa = Any Amino Acid
ACXELCANPACTXXGC

SEQ ID NO: 7959 - protein, 17 aa, Artificial Sequence
  Synthetically generated peptide
  VARIANT (1)..(17): Xaa = Any Amino Acid
ACXELCANPACTXXXGC

SEQ ID NO: 7960 - protein, 17 aa, Artificial Sequence
  Synthetically generated peptide
  VARIANT (1)..(17): Xaa = Any Amino Acid
ACXELCANPACTXXGXC

SEQ ID NO: 7961 - protein, 16 aa, Artificial Sequence
  Synthetically generated peptide
  VARIANT (1)..(16): Xaa = Any Amino Acid
ACXELCANPACTXGXC

SEQ ID NO: 7962 - protein, 17 aa, Artificial Sequence
  Synthetically generated peptide
  VARIANT (1)..(17): Xaa = Any Amino Acid
ACXELCANPACTXGXXC

SEQ ID NO: 7963 - protein, 15 aa, Artificial Sequence
  Synthetically generated peptide
  VARIANT (1)..(15): Xaa = Any Amino Acid
ACXELCANPACTGXC

SEQ ID NO: 7964 - protein, 16 aa, Artificial Sequence
  Synthetically generated peptide
  VARIANT (1)..(16): Xaa = Any Amino Acid
ACXELCANPACTGXXC

SEQ ID NO: 7965 - protein, 17 aa, Artificial Sequence
  Synthetically generated peptide
  VARIANT (1)..(17): Xaa = Any Amino Acid
ACXELCANPACTGXXXC

SEQ ID NO: 7966 - protein, 14 aa, Artificial Sequence
  Synthetically generated peptide
  VARIANT (1)..(14): Xaa = Any Amino Acid
ACEXLCANPACTGC

SEQ ID NO: 7967 - protein, 15 aa, Artificial Sequence
  Synthetically generated peptide
  VARIANT (1)..(15): Xaa = Any Amino Acid
ACEXXLCANPACTGC

SEQ ID NO: 7968 - protein, 16 aa, Artificial Sequence
  Synthetically generated peptide
  VARIANT (1)..(16): Xaa = Any Amino Acid
ACEXXXLCANPACTGC

SEQ ID NO: 7969 - protein, 17 aa, Artificial Sequence
  Synthetically generated peptide
  VARIANT (1)..(17): Xaa = Any Amino Acid
ACEXXXXLCANPACTGC

SEQ ID NO: 7970 - protein, 17 aa, Artificial Sequence
  Synthetically generated peptide
  VARIANT (1)..(17): Xaa = Any Amino Acid
ACEXXXLXCANPACTGC

SEQ ID NO: 7971 - protein, 17 aa, Artificial Sequence
  Synthetically generated peptide
  VARIANT (1)..(17): Xaa = Any Amino Acid
ACEXXXLCAXNPACTGC

SEQ ID NO: 7972 - protein, 17 aa, Artificial Sequence
  Synthetically generated peptide
  VARIANT (1)..(17): Xaa = Any Amino Acid
ACEXXXLCANXPACTGC

SEQ ID NO: 7973 - protein, 17 aa, Artificial Sequence
  Synthetically generated peptide
  VARIANT (1)..(17): Xaa = Any Amino Acid
ACEXXXLCANPXACTGC

SEQ ID NO: 7974 - protein, 17 aa, Artificial Sequence
  Synthetically generated peptide
  VARIANT (1)..(17): Xaa = Any Amino Acid
ACEXXXLCANPAXCTGC

SEQ ID NO: 7975 - protein, 17 aa, Artificial Sequence
  Synthetically generated peptide
  VARIANT (1)..(17): Xaa = Any Amino Acid
ACEXXXLCANPACXTGC

SEQ ID NO: 7976 - protein, 17 aa, Artificial Sequence
  Synthetically generated peptide
  VARIANT (1)..(17): Xaa = Any Amino Acid
ACEXXXLCANPACTXGC

SEQ ID NO: 7977 - protein, 17 aa, Artificial Sequence
  Synthetically generated peptide
  VARIANT (1)..(17): Xaa = Any Amino Acid
ACEXXXLCANPACTGXC

SEQ ID NO: 7978 - protein, 16 aa, Artificial Sequence
  Synthetically generated peptide
  VARIANT (1)..(16): Xaa = Any Amino Acid
ACEXXLXCANPACTGC

SEQ ID NO: 7979 - protein, 17 aa, Artificial Sequence
  Synthetically generated peptide
  VARIANT (1)..(17): Xaa = Any Amino Acid
ACEXXLXXCANPACTGC

SEQ ID NO: 7980 - protein, 17 aa, Artificial Sequence
  Synthetically generated peptide
  VARIANT (1)..(17): Xaa = Any Amino Acid
ACEXXLXCAXNPACTGC

SEQ ID NO: 7981 - protein, 17 aa, Artificial Sequence
  Synthetically generated peptide
  VARIANT (1)..(17): Xaa = Any Amino Acid
ACEXXLXCANXPACTGC

SEQ ID NO: 7982 - protein, 17 aa, Artificial Sequence
  Synthetically generated peptide
  VARIANT (1)..(17): Xaa = Any Amino Acid
ACEXXLXCANPXACTGC

SEQ ID NO: 7983 - protein, 17 aa, Artificial Sequence
  Synthetically generated peptide
  VARIANT (1)..(17): Xaa = Any Amino Acid
ACEXXLXCANPAXCTGC

SEQ ID NO: 7984 - protein, 17 aa, Artificial Sequence
  Synthetically generated peptide
  VARIANT (1)..(17): Xaa = Any Amino Acid
ACEXXLXCANPACXTGC

SEQ ID NO: 7985 - protein, 17 aa, Artificial Sequence
  Synthetically generated peptide
  VARIANT (1)..(17): Xaa = Any Amino Acid
ACEXXLXCANPACTXGC

SEQ ID NO: 7986 - protein, 17 aa, Artificial Sequence
  Synthetically generated peptide
  VARIANT (1)..(17): Xaa = Any Amino Acid
ACEXXLXCANPACTGXC

SEQ ID NO: 7987 - protein, 16 aa, Artificial Sequence
  Synthetically generated peptide
  VARIANT (1)..(16): Xaa = Any Amino Acid
ACEXXLCAXNPACTGC

SEQ ID NO: 7988 - protein, 17 aa, Artificial Sequence
  Synthetically generated peptide
  VARIANT (1)..(17): Xaa = Any Amino Acid
ACEXXLCAXXNPACTGC

SEQ ID NO: 7989 - protein, 17 aa, Artificial Sequence
  Synthetically generated peptide
  VARIANT (1)..(17): Xaa = Any Amino Acid
ACEXXLCAXNXPACTGC

SEQ ID NO: 7990 - protein, 17 aa, Artificial Sequence
  Synthetically generated peptide
  VARIANT (1)..(17): Xaa = Any Amino Acid
ACEXXLCAXNPXACTGC

SEQ ID NO: 7991 - protein, 17 aa, Artificial Sequence
  Synthetically generated peptide
  VARIANT (1)..(17): Xaa = Any Amino Acid
ACEXXLCAXNPAXCTGC

SEQ ID NO: 7992 - protein, 17 aa, Artificial Sequence
  Synthetically generated peptide
  VARIANT (1)..(17): Xaa = Any Amino Acid
ACEXXLCAXNPACXTGC

SEQ ID NO: 7993 - protein, 17 aa, Artificial Sequence
  Synthetically generated peptide
  VARIANT (1)..(17): Xaa = Any Amino Acid
ACEXXLCAXNPACTXGC

SEQ ID NO: 7994 - protein, 17 aa, Artificial Sequence
  Synthetically generated peptide
  VARIANT (1)..(17): Xaa = Any Amino Acid
ACEXXLCAXNPACTGXC

SEQ ID NO: 7995 - protein, 16 aa, Artificial Sequence
  Synthetically generated peptide
  VARIANT (1)..(16): Xaa = Any Amino Acid
ACEXXLCANXPACTGC

SEQ ID NO: 7996 - protein, 17 aa, Artificial Sequence
  Synthetically generated peptide
  VARIANT (1)..(17): Xaa = Any Amino Acid
ACEXXLCANXXPACTGC

SEQ ID NO: 7997 - protein, 17 aa, Artificial Sequence
  Synthetically generated peptide
  VARIANT (1)..(17): Xaa = Any Amino Acid
ACEXXLCANXPXACTGC

SEQ ID NO: 7998 - protein, 17 aa, Artificial Sequence
  Synthetically generated peptide
  VARIANT (1)..(17): Xaa = Any Amino Acid
ACEXXLCANXPAXCTGC

SEQ ID NO: 7999 - protein, 17 aa, Artificial Sequence
  Synthetically generated peptide
  VARIANT (1)..(17): Xaa = Any Amino Acid
ACEXXLCANXPACXTGC

SEQ ID NO: 8000 - protein, 17 aa, Artificial Sequence
  Synthetically generated peptide
  VARIANT (1)..(17): Xaa = Any Amino Acid
ACEXXLCANXPACTXGC

SEQ ID NO: 8001 - protein, 17 aa, Artificial Sequence
  Synthetically generated peptide
  VARIANT (1)..(17): Xaa = Any Amino Acid
ACEXXLCANXPACTGXC

SEQ ID NO: 8002 - protein, 16 aa, Artificial Sequence
  Synthetically generated peptide
  VARIANT (1)..(16): Xaa = Any Amino Acid
ACEXXLCANPXACTGC

SEQ ID NO: 8003 - protein, 17 aa, Artificial Sequence
  Synthetically generated peptide
  VARIANT (1)..(17): Xaa = Any Amino Acid
ACEXXLCANPXXACTGC

SEQ ID NO: 8004 - protein, 17 aa, Artificial Sequence
  Synthetically generated peptide
  VARIANT (1)..(17): Xaa = Any Amino Acid
ACEXXLCANPXAXCTGC

SEQ ID NO: 8005 - protein, 17 aa, Artificial Sequence
  Synthetically generated peptide
  VARIANT (1)..(17): Xaa = Any Amino Acid
ACEXXLCANPXACXTGC

SEQ ID NO: 8006 - protein, 17 aa, Artificial Sequence
  Synthetically generated peptide
  VARIANT (1)..(17): Xaa = Any Amino Acid
ACEXXLCANPXACTXGC

SEQ ID NO: 8007 - protein, 17 aa, Artificial Sequence
  Synthetically generated peptide
  VARIANT (1)..(17): Xaa = Any Amino Acid
ACEXXLCANPXACTGXC

SEQ ID NO: 8008 - protein, 16 aa, Artificial Sequence
  Synthetically generated peptide
  VARIANT (1)..(16): Xaa = Any Amino Acid
ACEXXLCANPAXCTGC

SEQ ID NO: 8009 - protein, 17 aa, Artificial Sequence
  Synthetically generated peptide
  VARIANT (1)..(17): Xaa = Any Amino Acid
ACEXXLCANPAXXCTGC

SEQ ID NO: 8010 - protein, 17 aa, Artificial Sequence
  Synthetically generated peptide
  VARIANT (1)..(17): Xaa = Any Amino Acid
ACEXXLCANPAXCXTGC

SEQ ID NO: 8011 - protein, 17 aa, Artificial Sequence
  Synthetically generated peptide
  VARIANT (1)..(17): Xaa = Any Amino Acid
ACEXXLCANPAXCTXGC

SEQ ID NO: 8012 - protein, 17 aa, Artificial Sequence
  Synthetically generated peptide
  VARIANT (1)..(17): Xaa = Any Amino Acid
ACEXXLCANPAXCTGXC

SEQ ID NO: 8013 - protein, 16 aa, Artificial Sequence
  Synthetically generated peptide
  VARIANT (1)..(16): Xaa = Any Amino Acid
ACEXXLCANPACXTGC

SEQ ID NO: 8014 - protein, 17 aa, Artificial Sequence
  Synthetically generated peptide
  VARIANT (1)..(17): Xaa = Any Amino Acid
ACEXXLCANPACXXTGC

SEQ ID NO: 8015 - protein, 17 aa, Artificial Sequence
  Synthetically generated peptide
  VARIANT (1)..(17): Xaa = Any Amino Acid
ACEXXLCANPACXTXGC

SEQ ID NO: 8016 - protein, 17 aa, Artificial Sequence
  Synthetically generated peptide
  VARIANT (1)..(17): Xaa = Any Amino Acid
ACEXXLCANPACXTGXC

SEQ ID NO: 8017 - protein, 16 aa, Artificial Sequence
  Synthetically generated peptide
  VARIANT (1)..(16): Xaa = Any Amino Acid
ACEXXLCANPACTXGC

SEQ ID NO: 8018 - protein, 17 aa, Artificial Sequence
  Synthetically generated peptide
  VARIANT (1)..(17): Xaa = Any Amino Acid
ACEXXLCANPACTXXGC

SEQ ID NO: 8019 - protein, 17 aa, Artificial Sequence
  Synthetically generated peptide
  VARIANT (1)..(17): Xaa = Any Amino Acid
ACEXXLCANPACTXGXC

SEQ ID NO: 8020 - protein, 16 aa, Artificial Sequence
  Synthetically generated peptide
  VARIANT (1)..(16): Xaa = Any Amino Acid
ACEXXLCANPACTGXC

SEQ ID NO: 8021 - protein, 17 aa, Artificial Sequence
  Synthetically generated peptide
  VARIANT (1)..(17): Xaa = Any Amino Acid
ACEXXLCANPACTGXXC

SEQ ID NO: 8022 - protein, 15 aa, Artificial Sequence
  Synthetically generated peptide
  VARIANT (1)..(15): Xaa = Any Amino Acid
ACEXLXCANPACTGC

SEQ ID NO: 8023 - protein, 16 aa, Artificial Sequence
  Synthetically generated peptide
  VARIANT (1)..(16): Xaa = Any Amino Acid
ACEXLXXCANPACTGC

SEQ ID NO: 8024 - protein, 17 aa, Artificial Sequence
  Synthetically generated peptide
  VARIANT (1)..(17): Xaa = Any Amino Acid
ACEXLXXXCANPACTGC

SEQ ID NO: 8025 - protein, 17 aa, Artificial Sequence
  Synthetically generated peptide
  VARIANT (1)..(17): Xaa = Any Amino Acid
ACEXLXXCAXNPACTGC

SEQ ID NO: 8026 - protein, 17 aa, Artificial Sequence
  Synthetically generated peptide
  VARIANT (1)..(17): Xaa = Any Amino Acid
ACEXLXXCANXPACTGC

SEQ ID NO: 8027 - protein, 17 aa, Artificial Sequence
  Synthetically generated peptide
  VARIANT (1)..(17): Xaa = Any Amino Acid
ACEXLXXCANPXACTGC

SEQ ID NO: 8028 - protein, 17 aa, Artificial Sequence
  Synthetically generated peptide
  VARIANT (1)..(17): Xaa = Any Amino Acid
ACEXLXXCANPAXCTGC

SEQ ID NO: 8029 - protein, 17 aa, Artificial Sequence
  Synthetically generated peptide
  VARIANT (1)..(17): Xaa = Any Amino Acid
ACEXLXXCANPACXTGC

SEQ ID NO: 8030 - protein, 17 aa, Artificial Sequence
  Synthetically generated peptide
  VARIANT (1)..(17): Xaa = Any Amino Acid
ACEXLXXCANPACTXGC

SEQ ID NO: 8031 - protein, 17 aa, Artificial Sequence
  Synthetically generated peptide
  VARIANT (1)..(17): Xaa = Any Amino Acid
ACEXLXXCANPACTGXC

SEQ ID NO: 8032 - protein, 16 aa, Artificial Sequence
  Synthetically generated peptide
  VARIANT (1)..(16): Xaa = Any Amino Acid
ACEXLXCAXNPACTGC

SEQ ID NO: 8033 - protein, 17 aa, Artificial Sequence
  Synthetically generated peptide
  VARIANT (1)..(17): Xaa = Any Amino Acid
ACEXLXCAXXNPACTGC

SEQ ID NO: 8034 - protein, 17 aa, Artificial Sequence
  Synthetically generated peptide
  VARIANT (1)..(17): Xaa = Any Amino Acid
ACEXLXCAXNXPACTGC

SEQ ID NO: 8035 - protein, 17 aa, Artificial Sequence
  Synthetically generated peptide
  VARIANT (1)..(17): Xaa = Any Amino Acid
ACEXLXCAXNPXACTGC

SEQ ID NO: 8036 - protein, 17 aa, Artificial Sequence
  Synthetically generated peptide
  VARIANT (1)..(17): Xaa = Any Amino Acid
ACEXLXCAXNPAXCTGC

SEQ ID NO: 8037 - protein, 17 aa, Artificial Sequence
  Synthetically generated peptide
  VARIANT (1)..(17): Xaa = Any Amino Acid
ACEXLXCAXNPACXTGC

SEQ ID NO: 8038 - protein, 17 aa, Artificial Sequence
  Synthetically generated peptide
  VARIANT (1)..(17): Xaa = Any Amino Acid
ACEXLXCAXNPACTXGC

SEQ ID NO: 8039 - protein, 17 aa, Artificial Sequence
  Synthetically generated peptide
  VARIANT (1)..(17): Xaa = Any Amino Acid
ACEXLXCAXNPACTGXC

SEQ ID NO: 8040 - protein, 16 aa, Artificial Sequence
  Synthetically generated peptide
  VARIANT (1)..(16): Xaa = Any Amino Acid
ACEXLXCANXPACTGC

SEQ ID NO: 8041 - protein, 17 aa, Artificial Sequence
  Synthetically generated peptide
  VARIANT (1)..(17): Xaa = Any Amino Acid
ACEXLXCANXXPACTGC

SEQ ID NO: 8042 - protein, 17 aa, Artificial Sequence
  Synthetically generated peptide
  VARIANT (1)..(17): Xaa = Any Amino Acid
ACEXLXCANXPXACTGC

SEQ ID NO: 8043 - protein, 17 aa, Artificial Sequence
  Synthetically generated peptide
  VARIANT (1)..(17): Xaa = Any Amino Acid
ACEXLXCANXPAXCTGC

SEQ ID NO: 8044 - protein, 17 aa, Artificial Sequence
  Synthetically generated peptide
  VARIANT (1)..(17): Xaa = Any Amino Acid
ACEXLXCANXPACXTGC

SEQ ID NO: 8045 - protein, 17 aa, Artificial Sequence
  Synthetically generated peptide
  VARIANT (1)..(17): Xaa = Any Amino Acid
ACEXLXCANXPACTXGC

SEQ ID NO: 8046 - protein, 17 aa, Artificial Sequence
  Synthetically generated peptide
  VARIANT (1)..(17): Xaa = Any Amino Acid
ACEXLXCANXPACTGXC

SEQ ID NO: 8047 - protein, 16 aa, Artificial Sequence
  Synthetically generated peptide
  VARIANT (1)..(16): Xaa = Any Amino Acid
ACEXLXCANPXACTGC

SEQ ID NO: 8048 - protein, 17 aa, Artificial Sequence
  Synthetically generated peptide
  VARIANT (1)..(17): Xaa = Any Amino Acid
ACEXLXCANPXXACTGC

SEQ ID NO: 8049 - protein, 17 aa, Artificial Sequence
  Synthetically generated peptide
  VARIANT (1)..(17): Xaa = Any Amino Acid
ACEXLXCANPXAXCTGC

SEQ ID NO: 8050 - protein, 17 aa, Artificial Sequence
  Synthetically generated peptide
  VARIANT (1)..(17): Xaa = Any Amino Acid
ACEXLXCANPXACXTGC

SEQ ID NO: 8051 - protein, 17 aa, Artificial Sequence
  Synthetically generated peptide
  VARIANT (1)..(17): Xaa = Any Amino Acid
ACEXLXCANPXACTXGC

SEQ ID NO: 8052 - protein, 17 aa, Artificial Sequence
  Synthetically generated peptide
  VARIANT (1)..(17): Xaa = Any Amino Acid
ACEXLXCANPXACTGXC

SEQ ID NO: 8053 - protein, 16 aa, Artificial Sequence
  Synthetically generated peptide
  VARIANT (1)..(16): Xaa = Any Amino Acid
ACEXLXCANPAXCTGC

SEQ ID NO: 8054 - protein, 17 aa, Artificial Sequence
  Synthetically generated peptide
  VARIANT (1)..(17): Xaa = Any Amino Acid
ACEXLXCANPAXXCTGC

SEQ ID NO: 8055 - protein, 17 aa, Artificial Sequence
  Synthetically generated peptide
  VARIANT (1)..(17): Xaa = Any Amino Acid
ACEXLXCANPAXCXTGC

SEQ ID NO: 8056 - protein, 17 aa, Artificial Sequence
  Synthetically generated peptide
  VARIANT (1)..(17): Xaa = Any Amino Acid
ACEXLXCANPAXCTXGC

SEQ ID NO: 8057 - protein, 17 aa, Artificial Sequence
  Synthetically generated peptide
  VARIANT (1)..(17): Xaa = Any Amino Acid
ACEXLXCANPAXCTGXC

SEQ ID NO: 8058 - protein, 16 aa, Artificial Sequence
  Synthetically generated peptide
  VARIANT (1)..(16): Xaa = Any Amino Acid
ACEXLXCANPACXTGC

SEQ ID NO: 8059 - protein, 17 aa, Artificial Sequence
  Synthetically generated peptide
  VARIANT (1)..(17): Xaa = Any Amino Acid
ACEXLXCANPACXXTGC

SEQ ID NO: 8060 - protein, 17 aa, Artificial Sequence
  Synthetically generated peptide
  VARIANT (1)..(17): Xaa = Any Amino Acid
ACEXLXCANPACXTXGC

SEQ ID NO: 8061 - protein, 17 aa, Artificial Sequence
  Synthetically generated peptide
  VARIANT (1)..(17): Xaa = Any Amino Acid
ACEXLXCANPACXTGXC

SEQ ID NO: 8062 - protein, 16 aa, Artificial Sequence
  Synthetically generated peptide
  VARIANT (1)..(16): Xaa = Any Amino Acid
ACEXLXCANPACTXGC

SEQ ID NO: 8063 - protein, 17 aa, Artificial Sequence
  Synthetically generated peptide
  VARIANT (1)..(17): Xaa = Any Amino Acid
ACEXLXCANPACTXXGC

SEQ ID NO: 8064 - protein, 17 aa, Artificial Sequence
  Synthetically generated peptide
  VARIANT (1)..(17): Xaa = Any Amino Acid
ACEXLXCANPACTXGXC

SEQ ID NO: 8065 - protein, 16 aa, Artificial Sequence
  Synthetically generated peptide
  VARIANT (1)..(16): Xaa = Any Amino Acid
ACEXLXCANPACTGXC

SEQ ID NO: 8066 - protein, 17 aa, Artificial Sequence
  Synthetically generated peptide
  VARIANT (1)..(17): Xaa = Any Amino Acid
ACEXLXCANPACTGXXC

SEQ ID NO: 8067 - protein, 15 aa, Artificial Sequence
  Synthetically generated peptide
  VARIANT (1)..(15): Xaa = Any Amino Acid
ACEXLCAXNPACTGC

SEQ ID NO: 8068 - protein, 16 aa, Artificial Sequence
  Synthetically generated peptide
  VARIANT (1)..(16): Xaa = Any Amino Acid
ACEXLCAXXNPACTGC

SEQ ID NO: 8069 - protein, 17 aa, Artificial Sequence
  Synthetically generated peptide
  VARIANT (1)..(17): Xaa = Any Amino Acid
ACEXLCAXXXNPACTGC

SEQ ID NO: 8070 - protein, 17 aa, Artificial Sequence
  Synthetically generated peptide
  VARIANT (1)..(17): Xaa = Any Amino Acid
ACEXLCAXXNXPACTGC

SEQ ID NO: 8071 - protein, 17 aa, Artificial Sequence
  Synthetically generated peptide
  VARIANT (1)..(17): Xaa = Any Amino Acid
ACEXLCAXXNPXACTGC

SEQ ID NO: 8072 - protein, 17 aa, Artificial Sequence
  Synthetically generated peptide
  VARIANT (1)..(17): Xaa = Any Amino Acid
ACEXLCAXXNPAXCTGC

SEQ ID NO: 8073 - protein, 17 aa, Artificial Sequence
  Synthetically generated peptide
  VARIANT (1)..(17): Xaa = Any Amino Acid
ACEXLCAXXNPACXTGC

SEQ ID NO: 8074 - protein, 17 aa, Artificial Sequence
  Synthetically generated peptide
  VARIANT (1)..(17): Xaa = Any Amino Acid
ACEXLCAXXNPACTXGC

SEQ ID NO: 8075 - protein, 17 aa, Artificial Sequence
  Synthetically generated peptide
  VARIANT (1)..(17): Xaa = Any Amino Acid
ACEXLCAXXNPACTGXC

SEQ ID NO: 8076 - protein, 16 aa, Artificial Sequence
  Synthetically generated peptide
  VARIANT (1)..(16): Xaa = Any Amino Acid
ACEXLCAXNXPACTGC

SEQ ID NO: 8077 - protein, 17 aa, Artificial Sequence
  Synthetically generated peptide
  VARIANT (1)..(17): Xaa = Any Amino Acid
ACEXLCAXNXXPACTGC

SEQ ID NO: 8078 - protein, 17 aa, Artificial Sequence
  Synthetically generated peptide
  VARIANT (1)..(17): Xaa = Any Amino Acid
ACEXLCAXNXPXACTGC

SEQ ID NO: 8079 - protein, 17 aa, Artificial Sequence
  Synthetically generated peptide
  VARIANT (1)..(17): Xaa = Any Amino Acid
ACEXLCAXNXPAXCTGC

SEQ ID NO: 8080 - protein, 17 aa, Artificial Sequence
  Synthetically generated peptide
  VARIANT (1)..(17): Xaa = Any Amino Acid
ACEXLCAXNXPACXTGC

SEQ ID NO: 8081 - protein, 17 aa, Artificial Sequence
  Synthetically generated peptide
  VARIANT (1)..(17): Xaa = Any Amino Acid
ACEXLCAXNXPACTXGC

SEQ ID NO: 8082 - protein, 17 aa, Artificial Sequence
  Synthetically generated peptide
  VARIANT (1)..(17): Xaa = Any Amino Acid
ACEXLCAXNXPACTGXC

SEQ ID NO: 8083 - protein, 16 aa, Artificial Sequence
  Synthetically generated peptide
  VARIANT (1)..(16): Xaa = Any Amino Acid
ACEXLCAXNPXACTGC

SEQ ID NO: 8084 - protein, 17 aa, Artificial Sequence
  Synthetically generated peptide
  VARIANT (1)..(17): Xaa = Any Amino Acid
ACEXLCAXNPXXACTGC

SEQ ID NO: 8085 - protein, 17 aa, Artificial Sequence
  Synthetically generated peptide
  VARIANT (1)..(17): Xaa = Any Amino Acid
ACEXLCAXNPXAXCTGC

SEQ ID NO: 8086 - protein, 17 aa, Artificial Sequence
  Synthetically generated peptide
  VARIANT (1)..(17): Xaa = Any Amino Acid
ACEXLCAXNPXACXTGC

SEQ ID NO: 8087 - protein, 17 aa, Artificial Sequence
  Synthetically generated peptide
  VARIANT (1)..(17): Xaa = Any Amino Acid
ACEXLCAXNPXACTXGC

SEQ ID NO: 8088 - protein, 17 aa, Artificial Sequence
  Synthetically generated peptide
  VARIANT (1)..(17): Xaa = Any Amino Acid
ACEXLCAXNPXACTGXC

SEQ ID NO: 8089 - protein, 16 aa, Artificial Sequence
  Synthetically generated peptide
  VARIANT (1)..(16): Xaa = Any Amino Acid
ACEXLCAXNPAXCTGC

SEQ ID NO: 8090 - protein, 17 aa, Artificial Sequence
  Synthetically generated peptide
  VARIANT (1)..(17): Xaa = Any Amino Acid
ACEXLCAXNPAXXCTGC

SEQ ID NO: 8091 - protein, 17 aa, Artificial Sequence
  Synthetically generated peptide
  VARIANT (1)..(17): Xaa = Any Amino Acid
ACEXLCAXNPAXCXTGC

SEQ ID NO: 8092 - protein, 17 aa, Artificial Sequence
  Synthetically generated peptide
  VARIANT (1)..(17): Xaa = Any Amino Acid
ACEXLCAXNPAXCTXGC

SEQ ID NO: 8093 - protein, 17 aa, Artificial Sequence
  Synthetically generated peptide
  VARIANT (1)..(17): Xaa = Any Amino Acid
ACEXLCAXNPAXCTGXC

SEQ ID NO: 8094 - protein, 16 aa, Artificial Sequence
  Synthetically generated peptide
  VARIANT (1)..(16): Xaa = Any Amino Acid
ACEXLCAXNPACXTGC

SEQ ID NO: 8095 - protein, 17 aa, Artificial Sequence
  Synthetically generated peptide
  VARIANT (1)..(17): Xaa = Any Amino Acid
ACEXLCAXNPACXXTGC

SEQ ID NO: 8096 - protein, 17 aa, Artificial Sequence
  Synthetically generated peptide
  VARIANT (1)..(17): Xaa = Any Amino Acid
ACEXLCAXNPACXTXGC

SEQ ID NO: 8097 - protein, 17 aa, Artificial Sequence
  Synthetically generated peptide
  VARIANT (1)..(17): Xaa = Any Amino Acid
ACEXLCAXNPACXTGXC

SEQ ID NO: 8098 - protein, 16 aa, Artificial Sequence
  Synthetically generated peptide
  VARIANT (1)..(16): Xaa = Any Amino Acid
ACEXLCAXNPACTXGC

SEQ ID NO: 8099 - protein, 17 aa, Artificial Sequence
  Synthetically generated peptide
  VARIANT (1)..(17): Xaa = Any Amino Acid
ACEXLCAXNPACTXXGC

SEQ ID NO: 8100 - protein, 17 aa, Artificial Sequence
  Synthetically generated peptide
  VARIANT (1)..(17): Xaa = Any Amino Acid
ACEXLCAXNPACTXGXC

SEQ ID NO: 8101 - protein, 16 aa, Artificial Sequence
  Synthetically generated peptide
  VARIANT (1)..(16): Xaa = Any Amino Acid
ACEXLCAXNPACTGXC

SEQ ID NO: 8102 - protein, 17 aa, Artificial Sequence
  Synthetically generated peptide
  VARIANT (1)..(17): Xaa = Any Amino Acid
ACEXLCAXNPACTGXXC

SEQ ID NO: 8103 - protein, 15 aa, Artificial Sequence
  Synthetically generated peptide
  VARIANT (1)..(15): Xaa = Any Amino Acid
ACEXLCANXPACTGC

SEQ ID NO: 8104 - protein, 16 aa, Artificial Sequence
  Synthetically generated peptide
  VARIANT (1)..(16): Xaa = Any Amino Acid
ACEXLCANXXPACTGC

SEQ ID NO: 8105 - protein, 17 aa, Artificial Sequence
  Synthetically generated peptide
  VARIANT (1)..(17): Xaa = Any Amino Acid
ACEXLCANXXXPACTGC

SEQ ID NO: 8106 - protein, 17 aa, Artificial Sequence
  Synthetically generated peptide
  VARIANT (1)..(17): Xaa = Any Amino Acid
ACEXLCANXXPXACTGC

SEQ ID NO: 8107 - protein, 17 aa, Artificial Sequence
  Synthetically generated peptide
  VARIANT (1)..(17): Xaa = Any Amino Acid
ACEXLCANXXPAXCTGC

SEQ ID NO: 8108 - protein, 17 aa, Artificial Sequence
  Synthetically generated peptide
  VARIANT (1)..(17): Xaa = Any Amino Acid
ACEXLCANXXPACXTGC

SEQ ID NO: 8109 - protein, 17 aa, Artificial Sequence
  Synthetically generated peptide
  VARIANT (1)..(17): Xaa = Any Amino Acid
ACEXLCANXXPACTXGC

SEQ ID NO: 8110 - protein, 17 aa, Artificial Sequence
  Synthetically generated peptide
  VARIANT (1)..(17): Xaa = Any Amino Acid
ACEXLCANXXPACTGXC

SEQ ID NO: 8111 - protein, 16 aa, Artificial Sequence
  Synthetically generated peptide
  VARIANT (1)..(16): Xaa = Any Amino Acid
ACEXLCANXPXACTGC

SEQ ID NO: 8112 - protein, 17 aa, Artificial Sequence
  Synthetically generated peptide
  VARIANT (1)..(17): Xaa = Any Amino Acid
ACEXLCANXPXXACTGC

SEQ ID NO: 8113 - protein, 17 aa, Artificial Sequence
  Synthetically generated peptide
  VARIANT (1)..(17): Xaa = Any Amino Acid
ACEXLCANXPXAXCTGC

SEQ ID NO: 8114 - protein, 17 aa, Artificial Sequence
  Synthetically generated peptide
  VARIANT (1)..(17): Xaa = Any Amino Acid
ACEXLCANXPXACXTGC

SEQ ID NO: 8115 - protein, 17 aa, Artificial Sequence
  Synthetically generated peptide
  VARIANT (1)..(17): Xaa = Any Amino Acid
ACEXLCANXPXACTXGC

SEQ ID NO: 8116 - protein, 17 aa, Artificial Sequence
  Synthetically generated peptide
  VARIANT (1)..(17): Xaa = Any Amino Acid
ACEXLCANXPXACTGXC

SEQ ID NO: 8117 - protein, 16 aa, Artificial Sequence
  Synthetically generated peptide
  VARIANT (1)..(16): Xaa = Any Amino Acid
ACEXLCANXPAXCTGC

SEQ ID NO: 8118 - protein, 17 aa, Artificial Sequence
  Synthetically generated peptide
  VARIANT (1)..(17): Xaa = Any Amino Acid
ACEXLCANXPAXXCTGC

SEQ ID NO: 8119 - protein, 17 aa, Artificial Sequence
  Synthetically generated peptide
  VARIANT (1)..(17): Xaa = Any Amino Acid
ACEXLCANXPAXCXTGC

SEQ ID NO: 8120 - protein, 17 aa, Artificial Sequence
  Synthetically generated peptide
  VARIANT (1)..(17): Xaa = Any Amino Acid
ACEXLCANXPAXCTXGC

SEQ ID NO: 8121 - protein, 17 aa, Artificial Sequence
  Synthetically generated peptide
  VARIANT (1)..(17): Xaa = Any Amino Acid
ACEXLCANXPAXCTGXC

SEQ ID NO: 8122 - protein, 16 aa, Artificial Sequence
  Synthetically generated peptide
  VARIANT (1)..(16): Xaa = Any Amino Acid
ACEXLCANXPACXTGC

SEQ ID NO: 8123 - protein, 17 aa, Artificial Sequence
  Synthetically generated peptide
  VARIANT (1)..(17): Xaa = Any Amino Acid
ACEXLCANXPACXXTGC

SEQ ID NO: 8124 - protein, 17 aa, Artificial Sequence
  Synthetically generated peptide
  VARIANT (1)..(17): Xaa = Any Amino Acid
ACEXLCANXPACXTXGC

SEQ ID NO: 8125 - protein, 17 aa, Artificial Sequence
  Synthetically generated peptide
  VARIANT (1)..(17): Xaa = Any Amino Acid
ACEXLCANXPACXTGXC

SEQ ID NO: 8126 - protein, 16 aa, Artificial Sequence
  Synthetically generated peptide
  VARIANT (1)..(16): Xaa = Any Amino Acid
ACEXLCANXPACTXGC

SEQ ID NO: 8127 - protein, 17 aa, Artificial Sequence
  Synthetically generated peptide
  VARIANT (1)..(17): Xaa = Any Amino Acid
ACEXLCANXPACTXXGC

SEQ ID NO: 8128 - protein, 17 aa, Artificial Sequence
  Synthetically generated peptide
  VARIANT (1)..(17): Xaa = Any Amino Acid
ACEXLCANXPACTXGXC

SEQ ID NO: 8129 - protein, 16 aa, Artificial Sequence
  Synthetically generated peptide
  VARIANT (1)..(16): Xaa = Any Amino Acid
ACEXLCANXPACTGXC

SEQ ID NO: 8130 - protein, 17 aa, Artificial Sequence
  Synthetically generated peptide
  VARIANT (1)..(17): Xaa = Any Amino Acid
ACEXLCANXPACTGXXC

SEQ ID NO: 8131 - protein, 15 aa, Artificial Sequence
  Synthetically generated peptide
  VARIANT (1)..(15): Xaa = Any Amino Acid
ACEXLCANPXACTGC

SEQ ID NO: 8132 - protein, 16 aa, Artificial Sequence
  Synthetically generated peptide
  VARIANT (1)..(16): Xaa = Any Amino Acid
ACEXLCANPXXACTGC

SEQ ID NO: 8133 - protein, 17 aa, Artificial Sequence
  Synthetically generated peptide
  VARIANT (1)..(17): Xaa = Any Amino Acid
ACEXLCANPXXXACTGC

SEQ ID NO: 8134 - protein, 17 aa, Artificial Sequence
  Synthetically generated peptide
  VARIANT (1)..(17): Xaa = Any Amino Acid
ACEXLCANPXXAXCTGC

SEQ ID NO: 8135 - protein, 17 aa, Artificial Sequence
  Synthetically generated peptide
  VARIANT (1)..(17): Xaa = Any Amino Acid
ACEXLCANPXXACXTGC

SEQ ID NO: 8136 - protein, 17 aa, Artificial Sequence
  Synthetically generated peptide
  VARIANT (1)..(17): Xaa = Any Amino Acid
ACEXLCANPXXACTXGC

SEQ ID NO: 8137 - protein, 17 aa, Artificial Sequence
  Synthetically generated peptide
  VARIANT (1)..(17): Xaa = Any Amino Acid
ACEXLCANPXXACTGXC

SEQ ID NO: 8138 - protein, 16 aa, Artificial Sequence
  Synthetically generated peptide
  VARIANT (1)..(16): Xaa = Any Amino Acid
ACEXLCANPXAXCTGC

SEQ ID NO: 8139 - protein, 17 aa, Artificial Sequence
  Synthetically generated peptide
  VARIANT (1)..(17): Xaa = Any Amino Acid
ACEXLCANPXAXXCTGC

SEQ ID NO: 8140 - protein, 17 aa, Artificial Sequence
  Synthetically generated peptide
  VARIANT (1)..(17): Xaa = Any Amino Acid
ACEXLCANPXAXCXTGC

SEQ ID NO: 8141 - protein, 17 aa, Artificial Sequence
  Synthetically generated peptide
  VARIANT (1)..(17): Xaa = Any Amino Acid
ACEXLCANPXAXCTXGC

SEQ ID NO: 8142 - protein, 17 aa, Artificial Sequence
  Synthetically generated peptide
  VARIANT (1)..(17): Xaa = Any Amino Acid
ACEXLCANPXAXCTGXC

SEQ ID NO: 8143 - protein, 16 aa, Artificial Sequence
  Synthetically generated peptide
  VARIANT (1)..(16): Xaa = Any Amino Acid
ACEXLCANPXACXTGC

SEQ ID NO: 8144 - protein, 17 aa, Artificial Sequence
  Synthetically generated peptide
  VARIANT (1)..(17): Xaa = Any Amino Acid
ACEXLCANPXACXXTGC

SEQ ID NO: 8145 - protein, 17 aa, Artificial Sequence
  Synthetically generated peptide
  VARIANT (1)..(17): Xaa = Any Amino Acid
ACEXLCANPXACXTXGC

SEQ ID NO: 8146 - protein, 17 aa, Artificial Sequence
  Synthetically generated peptide
  VARIANT (1)..(17): Xaa = Any Amino Acid
ACEXLCANPXACXTGXC

SEQ ID NO: 8147 - protein, 16 aa, Artificial Sequence
  Synthetically generated peptide
  VARIANT (1)..(16): Xaa = Any Amino Acid
ACEXLCANPXACTXGC

SEQ ID NO: 8148 - protein, 17 aa, Artificial Sequence
  Synthetically generated peptide
  VARIANT (1)..(17): Xaa = Any Amino Acid
ACEXLCANPXACTXXGC

SEQ ID NO: 8149 - protein, 17 aa, Artificial Sequence
  Synthetically generated peptide
  VARIANT (1)..(17): Xaa = Any Amino Acid
ACEXLCANPXACTXGXC

SEQ ID NO: 8150 - protein, 16 aa, Artificial Sequence
  Synthetically generated peptide
  VARIANT (1)..(16): Xaa = Any Amino Acid
ACEXLCANPXACTGXC

SEQ ID NO: 8151 - protein, 17 aa, Artificial Sequence
  Synthetically generated peptide
  VARIANT (1)..(17): Xaa = Any Amino Acid
ACEXLCANPXACTGXXC

SEQ ID NO: 8152 - protein, 15 aa, Artificial Sequence
  Synthetically generated peptide
  VARIANT (1)..(15): Xaa = Any Amino Acid
ACEXLCANPAXCTGC

SEQ ID NO: 8153 - protein, 16 aa, Artificial Sequence
  Synthetically generated peptide
  VARIANT (1)..(16): Xaa = Any Amino Acid
ACEXLCANPAXXCTGC

SEQ ID NO: 8154 - protein, 17 aa, Artificial Sequence
  Synthetically generated peptide
  VARIANT (1)..(17): Xaa = Any Amino Acid
ACEXLCANPAXXXCTGC

SEQ ID NO: 8155 - protein, 17 aa, Artificial Sequence
  Synthetically generated peptide
  VARIANT (1)..(17): Xaa = Any Amino Acid
ACEXLCANPAXXCXTGC

SEQ ID NO: 8156 - protein, 17 aa, Artificial Sequence
  Synthetically generated peptide
  VARIANT (1)..(17): Xaa = Any Amino Acid
ACEXLCANPAXXCTXGC

SEQ ID NO: 8157 - protein, 17 aa, Artificial Sequence
  Synthetically generated peptide
  VARIANT (1)..(17): Xaa = Any Amino Acid
ACEXLCANPAXXCTGXC

SEQ ID NO: 8158 - protein, 16 aa, Artificial Sequence
  Synthetically generated peptide
  VARIANT (1)..(16): Xaa = Any Amino Acid
ACEXLCANPAXCXTGC

SEQ ID NO: 8159 - protein, 17 aa, Artificial Sequence
  Synthetically generated peptide
  VARIANT (1)..(17): Xaa = Any Amino Acid
ACEXLCANPAXCXXTGC

SEQ ID NO: 8160 - protein, 17 aa, Artificial Sequence
  Synthetically generated peptide
  VARIANT (1)..(17): Xaa = Any Amino Acid
ACEXLCANPAXCXTXGC

SEQ ID NO: 8161 - protein, 17 aa, Artificial Sequence
  Synthetically generated peptide
  VARIANT (1)..(17): Xaa = Any Amino Acid
ACEXLCANPAXCXTGXC

SEQ ID NO: 8162 - protein, 16 aa, Artificial Sequence
  Synthetically generated peptide
  VARIANT (1)..(16): Xaa = Any Amino Acid
ACEXLCANPAXCTXGC

SEQ ID NO: 8163 - protein, 17 aa, Artificial Sequence
  Synthetically generated peptide
  VARIANT (1)..(17): Xaa = Any Amino Acid
ACEXLCANPAXCTXXGC

SEQ ID NO: 8164 - protein, 17 aa, Artificial Sequence
  Synthetically generated peptide
  VARIANT (1)..(17): Xaa = Any Amino Acid
ACEXLCANPAXCTXGXC

SEQ ID NO: 8165 - protein, 16 aa, Artificial Sequence
  Synthetically generated peptide
  VARIANT (1)..(16): Xaa = Any Amino Acid
ACEXLCANPAXCTGXC

SEQ ID NO: 8166 - protein, 17 aa, Artificial Sequence
  Synthetically generated peptide
  VARIANT (1)..(17): Xaa = Any Amino Acid
ACEXLCANPAXCTGXXC

SEQ ID NO: 8167 - protein, 15 aa, Artificial Sequence
  Synthetically generated peptide
  VARIANT (1)..(15): Xaa = Any Amino Acid
ACEXLCANPACXTGC

SEQ ID NO: 8168 - protein, 16 aa, Artificial Sequence
  Synthetically generated peptide
  VARIANT (1)..(16): Xaa = Any Amino Acid
ACEXLCANPACXXTGC

SEQ ID NO: 8169 - protein, 17 aa, Artificial Sequence
  Synthetically generated peptide
  VARIANT (1)..(17): Xaa = Any Amino Acid
ACEXLCANPACXXXTGC

SEQ ID NO: 8170 - protein, 17 aa, Artificial Sequence
  Synthetically generated peptide
  VARIANT (1)..(17): Xaa = Any Amino Acid
ACEXLCANPACXXTXGC

SEQ ID NO: 8171 - protein, 17 aa, Artificial Sequence
  Synthetically generated peptide
  VARIANT (1)..(17): Xaa = Any Amino Acid
ACEXLCANPACXXTGXC

SEQ ID NO: 8172 - protein, 16 aa, Artificial Sequence
  Synthetically generated peptide
  VARIANT (1)..(16): Xaa = Any Amino Acid
ACEXLCANPACXTXGC

SEQ ID NO: 8173 - protein, 17 aa, Artificial Sequence
  Synthetically generated peptide
  VARIANT (1)..(17): Xaa = Any Amino Acid
ACEXLCANPACXTXXGC

SEQ ID NO: 8174 - protein, 17 aa, Artificial Sequence
  Synthetically generated peptide
  VARIANT (1)..(17): Xaa = Any Amino Acid
ACEXLCANPACXTXGXC

SEQ ID NO: 8175 - protein, 16 aa, Artificial Sequence
  Synthetically generated peptide
  VARIANT (1)..(16): Xaa = Any Amino Acid
ACEXLCANPACXTGXC

SEQ ID NO: 8176 - protein, 17 aa, Artificial Sequence
  Synthetically generated peptide
  VARIANT (1)..(17): Xaa = Any Amino Acid
ACEXLCANPACXTGXXC

SEQ ID NO: 8177 - protein, 15 aa, Artificial Sequence
  Synthetically generated peptide
  VARIANT (1)..(15): Xaa = Any Amino Acid
ACEXLCANPACTXGC

SEQ ID NO: 8178 - protein, 16 aa, Artificial Sequence
  Synthetically generated peptide
  VARIANT (1)..(16): Xaa = Any Amino Acid
ACEXLCANPACTXXGC

SEQ ID NO: 8179 - protein, 17 aa, Artificial Sequence
  Synthetically generated peptide
  VARIANT (1)..(17): Xaa = Any Amino Acid
ACEXLCANPACTXXXGC

SEQ ID NO: 8180 - protein, 17 aa, Artificial Sequence
  Synthetically generated peptide
  VARIANT (1)..(17): Xaa = Any Amino Acid
ACEXLCANPACTXXGXC

SEQ ID NO: 8181 - protein, 16 aa, Artificial Sequence
  Synthetically generated peptide
  VARIANT (1)..(16): Xaa = Any Amino Acid
ACEXLCANPACTXGXC

SEQ ID NO: 8182 - protein, 17 aa, Artificial Sequence
  Synthetically generated peptide
  VARIANT (1)..(17): Xaa = Any Amino Acid
ACEXLCANPACTXGXXC

SEQ ID NO: 8183 - protein, 15 aa, Artificial Sequence
  Synthetically generated peptide
  VARIANT (1)..(15): Xaa = Any Amino Acid
ACEXLCANPACTGXC

SEQ ID NO: 8184 - protein, 16 aa, Artificial Sequence
  Synthetically generated peptide
  VARIANT (1)..(16): Xaa = Any Amino Acid
ACEXLCANPACTGXXC

SEQ ID NO: 8185 - protein, 17 aa, Artificial Sequence
  Synthetically generated peptide
  VARIANT (1)..(17): Xaa = Any Amino Acid
ACEXLCANPACTGXXXC

SEQ ID NO: 8186 - protein, 14 aa, Artificial Sequence
  Synthetically generated peptide
  VARIANT (1)..(14): Xaa = Any Amino Acid
ACELXCANPACTGC

SEQ ID NO: 8187 - protein, 15 aa, Artificial Sequence
  Synthetically generated peptide
  VARIANT (1)..(15): Xaa = Any Amino Acid
ACELXXCANPACTGC

SEQ ID NO: 8188 - protein, 16 aa, Artificial Sequence
  Synthetically generated peptide
  VARIANT (1)..(16): Xaa = Any Amino Acid
ACELXXXCANPACTGC

SEQ ID NO: 8189 - protein, 17 aa, Artificial Sequence
  Synthetically generated peptide
  VARIANT (1)..(17): Xaa = Any Amino Acid
ACELXXXXCANPACTGC

SEQ ID NO: 8190 - protein, 17 aa, Artificial Sequence
  Synthetically generated peptide
  VARIANT (1)..(17): Xaa = Any Amino Acid
ACELXXXCAXNPACTGC

SEQ ID NO: 8191 - protein, 17 aa, Artificial Sequence
  Synthetically generated peptide
  VARIANT (1)..(17): Xaa = Any Amino Acid
ACELXXXCANXPACTGC

SEQ ID NO: 8192 - protein, 17 aa, Artificial Sequence
  Synthetically generated peptide
  VARIANT (1)..(17): Xaa = Any Amino Acid
ACELXXXCANPXACTGC

SEQ ID NO: 8193 - protein, 17 aa, Artificial Sequence
  Synthetically generated peptide
  VARIANT (1)..(17): Xaa = Any Amino Acid
ACELXXXCANPAXCTGC

SEQ ID NO: 8194 - protein, 17 aa, Artificial Sequence
  Synthetically generated peptide
  VARIANT (1)..(17): Xaa = Any Amino Acid
ACELXXXCANPACXTGC

SEQ ID NO: 8195 - protein, 17 aa, Artificial Sequence
  Synthetically generated peptide
  VARIANT (1)..(17): Xaa = Any Amino Acid
ACELXXXCANPACTXGC

SEQ ID NO: 8196 - protein, 17 aa, Artificial Sequence
  Synthetically generated peptide
  VARIANT (1)..(17): Xaa = Any Amino Acid
ACELXXXCANPACTGXC

SEQ ID NO: 8197 - protein, 16 aa, Artificial Sequence
  Synthetically generated peptide
  VARIANT (1)..(16): Xaa = Any Amino Acid
ACELXXCAXNPACTGC

SEQ ID NO: 8198 - protein, 17 aa, Artificial Sequence
  Synthetically generated peptide
  VARIANT (1)..(17): Xaa = Any Amino Acid
ACELXXCAXXNPACTGC

SEQ ID NO: 8199 - protein, 17 aa, Artificial Sequence
  Synthetically generated peptide
  VARIANT (1)..(17): Xaa = Any Amino Acid
ACELXXCAXNXPACTGC

SEQ ID NO: 8200 - protein, 17 aa, Artificial Sequence
  Synthetically generated peptide
  VARIANT (1)..(17): Xaa = Any Amino Acid
ACELXXCAXNPXACTGC

SEQ ID NO: 8201 - protein, 17 aa, Artificial Sequence
  Synthetically generated peptide
  VARIANT (1)..(17): Xaa = Any Amino Acid
ACELXXCAXNPAXCTGC

SEQ ID NO: 8202 - protein, 17 aa, Artificial Sequence
  Synthetically generated peptide
  VARIANT (1)..(17): Xaa = Any Amino Acid
ACELXXCAXNPACXTGC

SEQ ID NO: 8203 - protein, 17 aa, Artificial Sequence
  Synthetically generated peptide
  VARIANT (1)..(17): Xaa = Any Amino Acid
ACELXXCAXNPACTXGC

SEQ ID NO: 8204 - protein, 17 aa, Artificial Sequence
  Synthetically generated peptide
  VARIANT (1)..(17): Xaa = Any Amino Acid
ACELXXCAXNPACTGXC

SEQ ID NO: 8205 - protein, 16 aa, Artificial Sequence
  Synthetically generated peptide
  VARIANT (1)..(16): Xaa = Any Amino Acid
ACELXXCANXPACTGC

SEQ ID NO: 8206 - protein, 17 aa, Artificial Sequence
  Synthetically generated peptide
  VARIANT (1)..(17): Xaa = Any Amino Acid
ACELXXCANXXPACTGC

SEQ ID NO: 8207 - protein, 17 aa, Artificial Sequence
  Synthetically generated peptide
  VARIANT (1)..(17): Xaa = Any Amino Acid
ACELXXCANXPXACTGC

SEQ ID NO: 8208 - protein, 17 aa, Artificial Sequence
  Synthetically generated peptide
  VARIANT (1)..(17): Xaa = Any Amino Acid
ACELXXCANXPAXCTGC

SEQ ID NO: 8209 - protein, 17 aa, Artificial Sequence
  Synthetically generated peptide
  VARIANT (1)..(17): Xaa = Any Amino Acid
ACELXXCANXPACXTGC

SEQ ID NO: 8210 - protein, 17 aa, Artificial Sequence
  Synthetically generated peptide
  VARIANT (1)..(17): Xaa = Any Amino Acid
ACELXXCANXPACTXGC

SEQ ID NO: 8211 - protein, 17 aa, Artificial Sequence
  Synthetically generated peptide
  VARIANT (1)..(17): Xaa = Any Amino Acid
ACELXXCANXPACTGXC

SEQ ID NO: 8212 - protein, 16 aa, Artificial Sequence
  Synthetically generated peptide
  VARIANT (1)..(16): Xaa = Any Amino Acid
ACELXXCANPXACTGC

SEQ ID NO: 8213 - protein, 17 aa, Artificial Sequence
  Synthetically generated peptide
  VARIANT (1)..(17): Xaa = Any Amino Acid
ACELXXCANPXXACTGC

SEQ ID NO: 8214 - protein, 17 aa, Artificial Sequence
  Synthetically generated peptide
  VARIANT (1)..(17): Xaa = Any Amino Acid
ACELXXCANPXAXCTGC

SEQ ID NO: 8215 - protein, 17 aa, Artificial Sequence
  Synthetically generated peptide
  VARIANT (1)..(17): Xaa = Any Amino Acid
ACELXXCANPXACXTGC

SEQ ID NO: 8216 - protein, 17 aa, Artificial Sequence
  Synthetically generated peptide
  VARIANT (1)..(17): Xaa = Any Amino Acid
ACELXXCANPXACTXGC

SEQ ID NO: 8217 - protein, 17 aa, Artificial Sequence
  Synthetically generated peptide
  VARIANT (1)..(17): Xaa = Any Amino Acid
ACELXXCANPXACTGXC

SEQ ID NO: 8218 - protein, 16 aa, Artificial Sequence
  Synthetically generated peptide
  VARIANT (1)..(16): Xaa = Any Amino Acid
ACELXXCANPAXCTGC

SEQ ID NO: 8219 - protein, 17 aa, Artificial Sequence
  Synthetically generated peptide
  VARIANT (1)..(17): Xaa = Any Amino Acid
ACELXXCANPAXXCTGC

SEQ ID NO: 8220 - protein, 17 aa, Artificial Sequence
  Synthetically generated peptide
  VARIANT (1)..(17): Xaa = Any Amino Acid
ACELXXCANPAXCXTGC

SEQ ID NO: 8221 - protein, 17 aa, Artificial Sequence
  Synthetically generated peptide
  VARIANT (1)..(17): Xaa = Any Amino Acid
ACELXXCANPAXCTXGC

SEQ ID NO: 8222 - protein, 17 aa, Artificial Sequence
  Synthetically generated peptide
  VARIANT (1)..(17): Xaa = Any Amino Acid
ACELXXCANPAXCTGXC

SEQ ID NO: 8223 - protein, 16 aa, Artificial Sequence
  Synthetically generated peptide
  VARIANT (1)..(16): Xaa = Any Amino Acid
ACELXXCANPACXTGC

SEQ ID NO: 8224 - protein, 17 aa, Artificial Sequence
  Synthetically generated peptide
  VARIANT (1)..(17): Xaa = Any Amino Acid
ACELXXCANPACXXTGC

SEQ ID NO: 8225 - protein, 17 aa, Artificial Sequence
  Synthetically generated peptide
  VARIANT (1)..(17): Xaa = Any Amino Acid
ACELXXCANPACXTXGC

SEQ ID NO: 8226 - protein, 17 aa, Artificial Sequence
  Synthetically generated peptide
  VARIANT (1)..(17): Xaa = Any Amino Acid
ACELXXCANPACXTGXC

SEQ ID NO: 8227 - protein, 16 aa, Artificial Sequence
  Synthetically generated peptide
  VARIANT (1)..(16): Xaa = Any Amino Acid
ACELXXCANPACTXGC

SEQ ID NO: 8228 - protein, 17 aa, Artificial Sequence
  Synthetically generated peptide
  VARIANT (1)..(17): Xaa = Any Amino Acid
ACELXXCANPACTXXGC

SEQ ID NO: 8229 - protein, 17 aa, Artificial Sequence
  Synthetically generated peptide
  VARIANT (1)..(17): Xaa = Any Amino Acid
ACELXXCANPACTXGXC

SEQ ID NO: 8230 - protein, 16 aa, Artificial Sequence
  Synthetically generated peptide
  VARIANT (1)..(16): Xaa = Any Amino Acid
ACELXXCANPACTGXC

SEQ ID NO: 8231 - protein, 17 aa, Artificial Sequence
  Synthetically generated peptide
  VARIANT (1)..(17): Xaa = Any Amino Acid
ACELXXCANPACTGXXC

SEQ ID NO: 8232 - protein, 15 aa, Artificial Sequence
  Synthetically generated peptide
  VARIANT (1)..(15): Xaa = Any Amino Acid
ACELXCAXNPACTGC

SEQ ID NO: 8233 - protein, 16 aa, Artificial Sequence
  Synthetically generated peptide
  VARIANT (1)..(16): Xaa = Any Amino Acid
ACELXCAXXNPACTGC

SEQ ID NO: 8234 - protein, 17 aa, Artificial Sequence
  Synthetically generated peptide
  VARIANT (1)..(17): Xaa = Any Amino Acid
ACELXCAXXXNPACTGC

SEQ ID NO: 8235 - protein, 17 aa, Artificial Sequence
  Synthetically generated peptide
  VARIANT (1)..(17): Xaa = Any Amino Acid
ACELXCAXXNXPACTGC

SEQ ID NO: 8236 - protein, 17 aa, Artificial Sequence
  Synthetically generated peptide
  VARIANT (1)..(17): Xaa = Any Amino Acid
ACELXCAXXNPXACTGC

SEQ ID NO: 8237 - protein, 17 aa, Artificial Sequence
  Synthetically generated peptide
  VARIANT (1)..(17): Xaa = Any Amino Acid
ACELXCAXXNPAXCTGC

SEQ ID NO: 8238 - protein, 17 aa, Artificial Sequence
  Synthetically generated peptide
  VARIANT (1)..(17): Xaa = Any Amino Acid
ACELXCAXXNPACXTGC

SEQ ID NO: 8239 - protein, 17 aa, Artificial Sequence
  Synthetically generated peptide
  VARIANT (1)..(17): Xaa = Any Amino Acid
ACELXCAXXNPACTXGC

SEQ ID NO: 8240 - protein, 17 aa, Artificial Sequence
  Synthetically generated peptide
  VARIANT (1)..(17): Xaa = Any Amino Acid
ACELXCAXXNPACTGXC

SEQ ID NO: 8241 - protein, 16 aa, Artificial Sequence
  Synthetically generated peptide
  VARIANT (1)..(16): Xaa = Any Amino Acid
ACELXCAXNXPACTGC

SEQ ID NO: 8242 - protein, 17 aa, Artificial Sequence
  Synthetically generated peptide
  VARIANT (1)..(17): Xaa = Any Amino Acid
ACELXCAXNXXPACTGC

SEQ ID NO: 8243 - protein, 17 aa, Artificial Sequence
  Synthetically generated peptide
  VARIANT (1)..(17): Xaa = Any Amino Acid
ACELXCAXNXPXACTGC

SEQ ID NO: 8244 - protein, 17 aa, Artificial Sequence
  Synthetically generated peptide
  VARIANT (1)..(17): Xaa = Any Amino Acid
ACELXCAXNXPAXCTGC

SEQ ID NO: 8245 - protein, 17 aa, Artificial Sequence
  Synthetically generated peptide
  VARIANT (1)..(17): Xaa = Any Amino Acid
ACELXCAXNXPACXTGC

SEQ ID NO: 8246 - protein, 17 aa, Artificial Sequence
  Synthetically generated peptide
  VARIANT (1)..(17): Xaa = Any Amino Acid
ACELXCAXNXPACTXGC

SEQ ID NO: 8247 - protein, 17 aa, Artificial Sequence
  Synthetically generated peptide
  VARIANT (1)..(17): Xaa = Any Amino Acid
ACELXCAXNXPACTGXC

SEQ ID NO: 8248 - protein, 16 aa, Artificial Sequence
  Synthetically generated peptide
  VARIANT (1)..(16): Xaa = Any Amino Acid
ACELXCAXNPXACTGC

SEQ ID NO: 8249 - protein, 17 aa, Artificial Sequence
  Synthetically generated peptide
  VARIANT (1)..(17): Xaa = Any Amino Acid
ACELXCAXNPXXACTGC

SEQ ID NO: 8250 - protein, 17 aa, Artificial Sequence
  Synthetically generated peptide
  VARIANT (1)..(17): Xaa = Any Amino Acid
ACELXCAXNPXAXCTGC

SEQ ID NO: 8251 - protein, 17 aa, Artificial Sequence
  Synthetically generated peptide
  VARIANT (1)..(17): Xaa = Any Amino Acid
ACELXCAXNPXACXTGC

SEQ ID NO: 8252 - protein, 17 aa, Artificial Sequence
  Synthetically generated peptide
  VARIANT (1)..(17): Xaa = Any Amino Acid
ACELXCAXNPXACTXGC

SEQ ID NO: 8253 - protein, 17 aa, Artificial Sequence
  Synthetically generated peptide
  VARIANT (1)..(17): Xaa = Any Amino Acid
ACELXCAXNPXACTGXC

SEQ ID NO: 8254 - protein, 16 aa, Artificial Sequence
  Synthetically generated peptide
  VARIANT (1)..(16): Xaa = Any Amino Acid
ACELXCAXNPAXCTGC

SEQ ID NO: 8255 - protein, 17 aa, Artificial Sequence
  Synthetically generated peptide
  VARIANT (1)..(17): Xaa = Any Amino Acid
ACELXCAXNPAXXCTGC

SEQ ID NO: 8256 - protein, 17 aa, Artificial Sequence
  Synthetically generated peptide
  VARIANT (1)..(17): Xaa = Any Amino Acid
ACELXCAXNPAXCXTGC

SEQ ID NO: 8257 - protein, 17 aa, Artificial Sequence
  Synthetically generated peptide
  VARIANT (1)..(17): Xaa = Any Amino Acid
ACELXCAXNPAXCTXGC

SEQ ID NO: 8258 - protein, 17 aa, Artificial Sequence
  Synthetically generated peptide
  VARIANT (1)..(17): Xaa = Any Amino Acid
ACELXCAXNPAXCTGXC

SEQ ID NO: 8259 - protein, 16 aa, Artificial Sequence
  Synthetically generated peptide
  VARIANT (1)..(16): Xaa = Any Amino Acid
ACELXCAXNPACXTGC

SEQ ID NO: 8260 - protein, 17 aa, Artificial Sequence
  Synthetically generated peptide
  VARIANT (1)..(17): Xaa = Any Amino Acid
ACELXCAXNPACXXTGC

SEQ ID NO: 8261 - protein, 17 aa, Artificial Sequence
  Synthetically generated peptide
  VARIANT (1)..(17): Xaa = Any Amino Acid
ACELXCAXNPACXTXGC

SEQ ID NO: 8262 - protein, 17 aa, Artificial Sequence
  Synthetically generated peptide
  VARIANT (1)..(17): Xaa = Any Amino Acid
ACELXCAXNPACXTGXC

SEQ ID NO: 8263 - protein, 16 aa, Artificial Sequence
  Synthetically generated peptide
  VARIANT (1)..(16): Xaa = Any Amino Acid
ACELXCAXNPACTXGC

SEQ ID NO: 8264 - protein, 17 aa, Artificial Sequence
  Synthetically generated peptide
  VARIANT (1)..(17): Xaa = Any Amino Acid
ACELXCAXNPACTXXGC

SEQ ID NO: 8265 - protein, 17 aa, Artificial Sequence
  Synthetically generated peptide
  VARIANT (1)..(17): Xaa = Any Amino Acid
ACELXCAXNPACTXGXC

SEQ ID NO: 8266 - protein, 16 aa, Artificial Sequence
  Synthetically generated peptide
  VARIANT (1)..(16): Xaa = Any Amino Acid
ACELXCAXNPACTGXC

SEQ ID NO: 8267 - protein, 17 aa, Artificial Sequence
  Synthetically generated peptide
  VARIANT (1)..(17): Xaa = Any Amino Acid
ACELXCAXNPACTGXXC

SEQ ID NO: 8268 - protein, 15 aa, Artificial Sequence
  Synthetically generated peptide
  VARIANT (1)..(15): Xaa = Any Amino Acid
ACELXCANXPACTGC

SEQ ID NO: 8269 - protein, 16 aa, Artificial Sequence
  Synthetically generated peptide
  VARIANT (1)..(16): Xaa = Any Amino Acid
ACELXCANXXPACTGC

SEQ ID NO: 8270 - protein, 17 aa, Artificial Sequence
  Synthetically generated peptide
  VARIANT (1)..(17): Xaa = Any Amino Acid
ACELXCANXXXPACTGC

SEQ ID NO: 8271 - protein, 17 aa, Artificial Sequence
  Synthetically generated peptide
  VARIANT (1)..(17): Xaa = Any Amino Acid
ACELXCANXXPXACTGC

SEQ ID NO: 8272 - protein, 17 aa, Artificial Sequence
  Synthetically generated peptide
  VARIANT (1)..(17): Xaa = Any Amino Acid
ACELXCANXXPAXCTGC

SEQ ID NO: 8273 - protein, 17 aa, Artificial Sequence
  Synthetically generated peptide
  VARIANT (1)..(17): Xaa = Any Amino Acid
ACELXCANXXPACXTGC

SEQ ID NO: 8274 - protein, 17 aa, Artificial Sequence
  Synthetically generated peptide
  VARIANT (1)..(17): Xaa = Any Amino Acid
ACELXCANXXPACTXGC

SEQ ID NO: 8275 - protein, 17 aa, Artificial Sequence
  Synthetically generated peptide
  VARIANT (1)..(17): Xaa = Any Amino Acid
ACELXCANXXPACTGXC

SEQ ID NO: 8276 - protein, 16 aa, Artificial Sequence
  Synthetically generated peptide
  VARIANT (1)..(16): Xaa = Any Amino Acid
ACELXCANXPXACTGC

SEQ ID NO: 8277 - protein, 17 aa, Artificial Sequence
  Synthetically generated peptide
  VARIANT (1)..(17): Xaa = Any Amino Acid
ACELXCANXPXXACTGC

SEQ ID NO: 8278 - protein, 17 aa, Artificial Sequence
  Synthetically generated peptide
  VARIANT (1)..(17): Xaa = Any Amino Acid
ACELXCANXPXAXCTGC

SEQ ID NO: 8279 - protein, 17 aa, Artificial Sequence
  Synthetically generated peptide
  VARIANT (1)..(17): Xaa = Any Amino Acid
ACELXCANXPXACXTGC

SEQ ID NO: 8280 - protein, 17 aa, Artificial Sequence
  Synthetically generated peptide
  VARIANT (1)..(17): Xaa = Any Amino Acid
ACELXCANXPXACTXGC

SEQ ID NO: 8281 - protein, 17 aa, Artificial Sequence
  Synthetically generated peptide
  VARIANT (1)..(17): Xaa = Any Amino Acid
ACELXCANXPXACTGXC

SEQ ID NO: 8282 - protein, 16 aa, Artificial Sequence
  Synthetically generated peptide
  VARIANT (1)..(16): Xaa = Any Amino Acid
ACELXCANXPAXCTGC

SEQ ID NO: 8283 - protein, 17 aa, Artificial Sequence
  Synthetically generated peptide
  VARIANT (1)..(17): Xaa = Any Amino Acid
ACELXCANXPAXXCTGC

SEQ ID NO: 8284 - protein, 17 aa, Artificial Sequence
  Synthetically generated peptide
  VARIANT (1)..(17): Xaa = Any Amino Acid
ACELXCANXPAXCXTGC

SEQ ID NO: 8285 - protein, 17 aa, Artificial Sequence
  Synthetically generated peptide
  VARIANT (1)..(17): Xaa = Any Amino Acid
ACELXCANXPAXCTXGC

SEQ ID NO: 8286 - protein, 17 aa, Artificial Sequence
  Synthetically generated peptide
  VARIANT (1)..(17): Xaa = Any Amino Acid
ACELXCANXPAXCTGXC

SEQ ID NO: 8287 - protein, 16 aa, Artificial Sequence
  Synthetically generated peptide
  VARIANT (1)..(16): Xaa = Any Amino Acid
ACELXCANXPACXTGC

SEQ ID NO: 8288 - protein, 17 aa, Artificial Sequence
  Synthetically generated peptide
  VARIANT (1)..(17): Xaa = Any Amino Acid
ACELXCANXPACXXTGC

SEQ ID NO: 8289 - protein, 17 aa, Artificial Sequence
  Synthetically generated peptide
  VARIANT (1)..(17): Xaa = Any Amino Acid
ACELXCANXPACXTXGC

SEQ ID NO: 8290 - protein, 17 aa, Artificial Sequence
  Synthetically generated peptide
  VARIANT (1)..(17): Xaa = Any Amino Acid
ACELXCANXPACXTGXC

SEQ ID NO: 8291 - protein, 16 aa, Artificial Sequence
  Synthetically generated peptide
  VARIANT (1)..(16): Xaa = Any Amino Acid
ACELXCANXPACTXGC

SEQ ID NO: 8292 - protein, 17 aa, Artificial Sequence
  Synthetically generated peptide
  VARIANT (1)..(17): Xaa = Any Amino Acid
ACELXCANXPACTXXGC

SEQ ID NO: 8293 - protein, 17 aa, Artificial Sequence
  Synthetically generated peptide
  VARIANT (1)..(17): Xaa = Any Amino Acid
ACELXCANXPACTXGXC

SEQ ID NO: 8294 - protein, 16 aa, Artificial Sequence
  Synthetically generated peptide
  VARIANT (1)..(16): Xaa = Any Amino Acid
ACELXCANXPACTGXC

SEQ ID NO: 8295 - protein, 17 aa, Artificial Sequence
  Synthetically generated peptide
  VARIANT (1)..(17): Xaa = Any Amino Acid
ACELXCANXPACTGXXC

SEQ ID NO: 8296 - protein, 15 aa, Artificial Sequence
  Synthetically generated peptide
  VARIANT (1)..(15): Xaa = Any Amino Acid
ACELXCANPXACTGC

SEQ ID NO: 8297 - protein, 16 aa, Artificial Sequence
  Synthetically generated peptide
  VARIANT (1)..(16): Xaa = Any Amino Acid
ACELXCANPXXACTGC

SEQ ID NO: 8298 - protein, 17 aa, Artificial Sequence
  Synthetically generated peptide
  VARIANT (1)..(17): Xaa = Any Amino Acid
ACELXCANPXXXACTGC

SEQ ID NO: 8299 - protein, 17 aa, Artificial Sequence
  Synthetically generated peptide
  VARIANT (1)..(17): Xaa = Any Amino Acid
ACELXCANPXXAXCTGC

SEQ ID NO: 8300 - protein, 17 aa, Artificial Sequence
  Synthetically generated peptide
  VARIANT (1)..(17): Xaa = Any Amino Acid
ACELXCANPXXACXTGC

SEQ ID NO: 8301 - protein, 17 aa, Artificial Sequence
  Synthetically generated peptide
  VARIANT (1)..(17): Xaa = Any Amino Acid
ACELXCANPXXACTXGC

SEQ ID NO: 8302 - protein, 17 aa, Artificial Sequence
  Synthetically generated peptide
  VARIANT (1)..(17): Xaa = Any Amino Acid
ACELXCANPXXACTGXC

SEQ ID NO: 8303 - protein, 16 aa, Artificial Sequence
  Synthetically generated peptide
  VARIANT (1)..(16): Xaa = Any Amino Acid
ACELXCANPXAXCTGC

SEQ ID NO: 8304 - protein, 17 aa, Artificial Sequence
  Synthetically generated peptide
  VARIANT (1)..(17): Xaa = Any Amino Acid
ACELXCANPXAXXCTGC

SEQ ID NO: 8305 - protein, 17 aa, Artificial Sequence
  Synthetically generated peptide
  VARIANT (1)..(17): Xaa = Any Amino Acid
ACELXCANPXAXCXTGC

SEQ ID NO: 8306 - protein, 17 aa, Artificial Sequence
  Synthetically generated peptide
  VARIANT (1)..(17): Xaa = Any Amino Acid
ACELXCANPXAXCTXGC

SEQ ID NO: 8307 - protein, 17 aa, Artificial Sequence
  Synthetically generated peptide
  VARIANT (1)..(17): Xaa = Any Amino Acid
ACELXCANPXAXCTGXC

SEQ ID NO: 8308 - protein, 16 aa, Artificial Sequence
  Synthetically generated peptide
  VARIANT (1)..(16): Xaa = Any Amino Acid
ACELXCANPXACXTGC

SEQ ID NO: 8309 - protein, 17 aa, Artificial Sequence
  Synthetically generated peptide
  VARIANT (1)..(17): Xaa = Any Amino Acid
ACELXCANPXACXXTGC

SEQ ID NO: 8310 - protein, 17 aa, Artificial Sequence
  Synthetically generated peptide
  VARIANT (1)..(17): Xaa = Any Amino Acid
ACELXCANPXACXTXGC

SEQ ID NO: 8311 - protein, 17 aa, Artificial Sequence
  Synthetically generated peptide
  VARIANT (1)..(17): Xaa = Any Amino Acid
ACELXCANPXACXTGXC

SEQ ID NO: 8312 - protein, 16 aa, Artificial Sequence
  Synthetically generated peptide
  VARIANT (1)..(16): Xaa = Any Amino Acid
ACELXCANPXACTXGC

SEQ ID NO: 8313 - protein, 17 aa, Artificial Sequence
  Synthetically generated peptide
  VARIANT (1)..(17): Xaa = Any Amino Acid
ACELXCANPXACTXXGC

SEQ ID NO: 8314 - protein, 17 aa, Artificial Sequence
  Synthetically generated peptide
  VARIANT (1)..(17): Xaa = Any Amino Acid
ACELXCANPXACTXGXC

SEQ ID NO: 8315 - protein, 16 aa, Artificial Sequence
  Synthetically generated peptide
  VARIANT (1)..(16): Xaa = Any Amino Acid
ACELXCANPXACTGXC

SEQ ID NO: 8316 - protein, 17 aa, Artificial Sequence
  Synthetically generated peptide
  VARIANT (1)..(17): Xaa = Any Amino Acid
ACELXCANPXACTGXXC

SEQ ID NO: 8317 - protein, 15 aa, Artificial Sequence
  Synthetically generated peptide
  VARIANT (1)..(15): Xaa = Any Amino Acid
ACELXCANPAXCTGC

SEQ ID NO: 8318 - protein, 16 aa, Artificial Sequence
  Synthetically generated peptide
  VARIANT (1)..(16): Xaa = Any Amino Acid
ACELXCANPAXXCTGC

SEQ ID NO: 8319 - protein, 17 aa, Artificial Sequence
  Synthetically generated peptide
  VARIANT (1)..(17): Xaa = Any Amino Acid
ACELXCANPAXXXCTGC

SEQ ID NO: 8320 - protein, 17 aa, Artificial Sequence
  Synthetically generated peptide
  VARIANT (1)..(17): Xaa = Any Amino Acid
ACELXCANPAXXCXTGC

SEQ ID NO: 8321 - protein, 17 aa, Artificial Sequence
  Synthetically generated peptide
  VARIANT (1)..(17): Xaa = Any Amino Acid
ACELXCANPAXXCTXGC

SEQ ID NO: 8322 - protein, 17 aa, Artificial Sequence
  Synthetically generated peptide
  VARIANT (1)..(17): Xaa = Any Amino Acid
ACELXCANPAXXCTGXC

SEQ ID NO: 8323 - protein, 16 aa, Artificial Sequence
  Synthetically generated peptide
  VARIANT (1)..(16): Xaa = Any Amino Acid
ACELXCANPAXCXTGC

SEQ ID NO: 8324 - protein, 17 aa, Artificial Sequence
  Synthetically generated peptide
  VARIANT (1)..(17): Xaa = Any Amino Acid
ACELXCANPAXCXXTGC

SEQ ID NO: 8325 - protein, 17 aa, Artificial Sequence
  Synthetically generated peptide
  VARIANT (1)..(17): Xaa = Any Amino Acid
ACELXCANPAXCXTXGC

SEQ ID NO: 8326 - protein, 17 aa, Artificial Sequence
  Synthetically generated peptide
  VARIANT (1)..(17): Xaa = Any Amino Acid
ACELXCANPAXCXTGXC

SEQ ID NO: 8327 - protein, 16 aa, Artificial Sequence
  Synthetically generated peptide
  VARIANT (1)..(16): Xaa = Any Amino Acid
ACELXCANPAXCTXGC

SEQ ID NO: 8328 - protein, 17 aa, Artificial Sequence
  Synthetically generated peptide
  VARIANT (1)..(17): Xaa = Any Amino Acid
ACELXCANPAXCTXXGC

SEQ ID NO: 8329 - protein, 17 aa, Artificial Sequence
  Synthetically generated peptide
  VARIANT (1)..(17): Xaa = Any Amino Acid
ACELXCANPAXCTXGXC

SEQ ID NO: 8330 - protein, 16 aa, Artificial Sequence
  Synthetically generated peptide
  VARIANT (1)..(16): Xaa = Any Amino Acid
ACELXCANPAXCTGXC

SEQ ID NO: 8331 - protein, 17 aa, Artificial Sequence
  Synthetically generated peptide
  VARIANT (1)..(17): Xaa = Any Amino Acid
ACELXCANPAXCTGXXC

SEQ ID NO: 8332 - protein, 15 aa, Artificial Sequence
  Synthetically generated peptide
  VARIANT (1)..(15): Xaa = Any Amino Acid
ACELXCANPACXTGC

SEQ ID NO: 8333 - protein, 16 aa, Artificial Sequence
  Synthetically generated peptide
  VARIANT (1)..(16): Xaa = Any Amino Acid
ACELXCANPACXXTGC

SEQ ID NO: 8334 - protein, 17 aa, Artificial Sequence
  Synthetically generated peptide
  VARIANT (1)..(17): Xaa = Any Amino Acid
ACELXCANPACXXXTGC

SEQ ID NO: 8335 - protein, 17 aa, Artificial Sequence
  Synthetically generated peptide
  VARIANT (1)..(17): Xaa = Any Amino Acid
ACELXCANPACXXTXGC

SEQ ID NO: 8336 - protein, 17 aa, Artificial Sequence
  Synthetically generated peptide
  VARIANT (1)..(17): Xaa = Any Amino Acid
ACELXCANPACXXTGXC

SEQ ID NO: 8337 - protein, 16 aa, Artificial Sequence
  Synthetically generated peptide
  VARIANT (1)..(16): Xaa = Any Amino Acid
ACELXCANPACXTXGC

SEQ ID NO: 8338 - protein, 17 aa, Artificial Sequence
  Synthetically generated peptide
  VARIANT (1)..(17): Xaa = Any Amino Acid
ACELXCANPACXTXXGC

SEQ ID NO: 8339 - protein, 17 aa, Artificial Sequence
  Synthetically generated peptide
  VARIANT (1)..(17): Xaa = Any Amino Acid
ACELXCANPACXTXGXC

SEQ ID NO: 8340 - protein, 16 aa, Artificial Sequence
  Synthetically generated peptide
  VARIANT (1)..(16): Xaa = Any Amino Acid
ACELXCANPACXTGXC

SEQ ID NO: 8341 - protein, 17 aa, Artificial Sequence
  Synthetically generated peptide
  VARIANT (1)..(17): Xaa = Any Amino Acid
ACELXCANPACXTGXXC

SEQ ID NO: 8342 - protein, 15 aa, Artificial Sequence
  Synthetically generated peptide
  VARIANT (1)..(15): Xaa = Any Amino Acid
ACELXCANPACTXGC

SEQ ID NO: 8343 - protein, 16 aa, Artificial Sequence
  Synthetically generated peptide
  VARIANT (1)..(16): Xaa = Any Amino Acid
ACELXCANPACTXXGC

SEQ ID NO: 8344 - protein, 17 aa, Artificial Sequence
  Synthetically generated peptide
  VARIANT (1)..(17): Xaa = Any Amino Acid
ACELXCANPACTXXXGC

SEQ ID NO: 8345 - protein, 17 aa, Artificial Sequence
  Synthetically generated peptide
  VARIANT (1)..(17): Xaa = Any Amino Acid
ACELXCANPACTXXGXC

SEQ ID NO: 8346 - protein, 16 aa, Artificial Sequence
  Synthetically generated peptide
  VARIANT (1)..(16): Xaa = Any Amino Acid
ACELXCANPACTXGXC

SEQ ID NO: 8347 - protein, 17 aa, Artificial Sequence
  Synthetically generated peptide
  VARIANT (1)..(17): Xaa = Any Amino Acid
ACELXCANPACTXGXXC

SEQ ID NO: 8348 - protein, 15 aa, Artificial Sequence
  Synthetically generated peptide
  VARIANT (1)..(15): Xaa = Any Amino Acid
ACELXCANPACTGXC

SEQ ID NO: 8349 - protein, 16 aa, Artificial Sequence
  Synthetically generated peptide
  VARIANT (1)..(16): Xaa = Any Amino Acid
ACELXCANPACTGXXC

SEQ ID NO: 8350 - protein, 17 aa, Artificial Sequence
  Synthetically generated peptide
  VARIANT (1)..(17): Xaa = Any Amino Acid
ACELXCANPACTGXXXC

SEQ ID NO: 8351 - protein, 14 aa, Artificial Sequence
  Synthetically generated peptide
  VARIANT (1)..(14): Xaa = Any Amino Acid
ACELCAXNPACTGC

SEQ ID NO: 8352 - protein, 15 aa, Artificial Sequence
  Synthetically generated peptide
  VARIANT (1)..(15): Xaa = Any Amino Acid
ACELCAXXNPACTGC

SEQ ID NO: 8353 - protein, 16 aa, Artificial Sequence
  Synthetically generated peptide
  VARIANT (1)..(16): Xaa = Any Amino Acid
ACELCAXXXNPACTGC

SEQ ID NO: 8354 - protein, 17 aa, Artificial Sequence
  Synthetically generated peptide
  VARIANT (1)..(17): Xaa = Any Amino Acid
ACELCAXXXXNPACTGC

SEQ ID NO: 8355 - protein, 17 aa, Artificial Sequence
  Synthetically generated peptide
  VARIANT (1)..(17): Xaa = Any Amino Acid
ACELCAXXXNXPACTGC

SEQ ID NO: 8356 - protein, 17 aa, Artificial Sequence
  Synthetically generated peptide
  VARIANT (1)..(17): Xaa = Any Amino Acid
ACELCAXXXNPXACTGC

SEQ ID NO: 8357 - protein, 17 aa, Artificial Sequence
  Synthetically generated peptide
  VARIANT (1)..(17): Xaa = Any Amino Acid
ACELCAXXXNPAXCTGC

SEQ ID NO: 8358 - protein, 17 aa, Artificial Sequence
  Synthetically generated peptide
  VARIANT (1)..(17): Xaa = Any Amino Acid
ACELCAXXXNPACXTGC

SEQ ID NO: 8359 - protein, 17 aa, Artificial Sequence
  Synthetically generated peptide
  VARIANT (1)..(17): Xaa = Any Amino Acid
ACELCAXXXNPACTXGC

SEQ ID NO: 8360 - protein, 17 aa, Artificial Sequence
  Synthetically generated peptide
  VARIANT (1)..(17): Xaa = Any Amino Acid
ACELCAXXXNPACTGXC

SEQ ID NO: 8361 - protein, 16 aa, Artificial Sequence
  Synthetically generated peptide
  VARIANT (1)..(16): Xaa = Any Amino Acid
ACELCAXXNXPACTGC

SEQ ID NO: 8362 - protein, 17 aa, Artificial Sequence
  Synthetically generated peptide
  VARIANT (1)..(17): Xaa = Any Amino Acid
ACELCAXXNXXPACTGC

SEQ ID NO: 8363 - protein, 17 aa, Artificial Sequence
  Synthetically generated peptide
  VARIANT (1)..(17): Xaa = Any Amino Acid
ACELCAXXNXPXACTGC

SEQ ID NO: 8364 - protein, 17 aa, Artificial Sequence
  Synthetically generated peptide
  VARIANT (1)..(17): Xaa = Any Amino Acid
ACELCAXXNXPAXCTGC

SEQ ID NO: 8365 - protein, 17 aa, Artificial Sequence
  Synthetically generated peptide
  VARIANT (1)..(17): Xaa = Any Amino Acid
ACELCAXXNXPACXTGC

SEQ ID NO: 8366 - protein, 17 aa, Artificial Sequence
  Synthetically generated peptide
  VARIANT (1)..(17): Xaa = Any Amino Acid
ACELCAXXNXPACTXGC

SEQ ID NO: 8367 - protein, 17 aa, Artificial Sequence
  Synthetically generated peptide
  VARIANT (1)..(17): Xaa = Any Amino Acid
ACELCAXXNXPACTGXC

SEQ ID NO: 8368 - protein, 16 aa, Artificial Sequence
  Synthetically generated peptide
  VARIANT (1)..(16): Xaa = Any Amino Acid
ACELCAXXNPXACTGC

SEQ ID NO: 8369 - protein, 17 aa, Artificial Sequence
  Synthetically generated peptide
  VARIANT (1)..(17): Xaa = Any Amino Acid
ACELCAXXNPXXACTGC

SEQ ID NO: 8370 - protein, 17 aa, Artificial Sequence
  Synthetically generated peptide
  VARIANT (1)..(17): Xaa = Any Amino Acid
ACELCAXXNPXAXCTGC

SEQ ID NO: 8371 - protein, 17 aa, Artificial Sequence
  Synthetically generated peptide
  VARIANT (1)..(17): Xaa = Any Amino Acid
ACELCAXXNPXACXTGC

SEQ ID NO: 8372 - protein, 17 aa, Artificial Sequence
  Synthetically generated peptide
  VARIANT (1)..(17): Xaa = Any Amino Acid
ACELCAXXNPXACTXGC

SEQ ID NO: 8373 - protein, 17 aa, Artificial Sequence
  Synthetically generated peptide
  VARIANT (1)..(17): Xaa = Any Amino Acid
ACELCAXXNPXACTGXC

SEQ ID NO: 8374 - protein, 16 aa, Artificial Sequence
  Synthetically generated peptide
  VARIANT (1)..(16): Xaa = Any Amino Acid
ACELCAXXNPAXCTGC

SEQ ID NO: 8375 - protein, 17 aa, Artificial Sequence
  Synthetically generated peptide
  VARIANT (1)..(17): Xaa = Any Amino Acid
ACELCAXXNPAXXCTGC

SEQ ID NO: 8376 - protein, 17 aa, Artificial Sequence
  Synthetically generated peptide
  VARIANT (1)..(17): Xaa = Any Amino Acid
ACELCAXXNPAXCXTGC

SEQ ID NO: 8377 - protein, 17 aa, Artificial Sequence
  Synthetically generated peptide
  VARIANT (1)..(17): Xaa = Any Amino Acid
ACELCAXXNPAXCTXGC

SEQ ID NO: 8378 - protein, 17 aa, Artificial Sequence
  Synthetically generated peptide
  VARIANT (1)..(17): Xaa = Any Amino Acid
ACELCAXXNPAXCTGXC

SEQ ID NO: 8379 - protein, 16 aa, Artificial Sequence
  Synthetically generated peptide
  VARIANT (1)..(16): Xaa = Any Amino Acid
ACELCAXXNPACXTGC

SEQ ID NO: 8380 - protein, 17 aa, Artificial Sequence
  Synthetically generated peptide
  VARIANT (1)..(17): Xaa = Any Amino Acid
ACELCAXXNPACXXTGC

SEQ ID NO: 8381 - protein, 17 aa, Artificial Sequence
  Synthetically generated peptide
  VARIANT (1)..(17): Xaa = Any Amino Acid
ACELCAXXNPACXTXGC

SEQ ID NO: 8382 - protein, 17 aa, Artificial Sequence
  Synthetically generated peptide
  VARIANT (1)..(17): Xaa = Any Amino Acid
ACELCAXXNPACXTGXC

SEQ ID NO: 8383 - protein, 16 aa, Artificial Sequence
  Synthetically generated peptide
  VARIANT (1)..(16): Xaa = Any Amino Acid
ACELCAXXNPACTXGC

SEQ ID NO: 8384 - protein, 17 aa, Artificial Sequence
  Synthetically generated peptide
  VARIANT (1)..(17): Xaa = Any Amino Acid
ACELCAXXNPACTXXGC

SEQ ID NO: 8385 - protein, 17 aa, Artificial Sequence
  Synthetically generated peptide
  VARIANT (1)..(17): Xaa = Any Amino Acid
ACELCAXXNPACTXGXC

SEQ ID NO: 8386 - protein, 16 aa, Artificial Sequence
  Synthetically generated peptide
  VARIANT (1)..(16): Xaa = Any Amino Acid
ACELCAXXNPACTGXC

SEQ ID NO: 8387 - protein, 17 aa, Artificial Sequence
  Synthetically generated peptide
  VARIANT (1)..(17): Xaa = Any Amino Acid
ACELCAXXNPACTGXXC

SEQ ID NO: 8388 - protein, 15 aa, Artificial Sequence
  Synthetically generated peptide
  VARIANT (1)..(15): Xaa = Any Amino Acid
ACELCAXNXPACTGC

SEQ ID NO: 8389 - protein, 16 aa, Artificial Sequence
  Synthetically generated peptide
  VARIANT (1)..(16): Xaa = Any Amino Acid
ACELCAXNXXPACTGC

SEQ ID NO: 8390 - protein, 17 aa, Artificial Sequence
  Synthetically generated peptide
  VARIANT (1)..(17): Xaa = Any Amino Acid
ACELCAXNXXXPACTGC

SEQ ID NO: 8391 - protein, 17 aa, Artificial Sequence
  Synthetically generated peptide
  VARIANT (1)..(17): Xaa = Any Amino Acid
ACELCAXNXXPXACTGC

SEQ ID NO: 8392 - protein, 17 aa, Artificial Sequence
  Synthetically generated peptide
  VARIANT (1)..(17): Xaa = Any Amino Acid
ACELCAXNXXPAXCTGC

SEQ ID NO: 8393 - protein, 17 aa, Artificial Sequence
  Synthetically generated peptide
  VARIANT (1)..(17): Xaa = Any Amino Acid
ACELCAXNXXPACXTGC

SEQ ID NO: 8394 - protein, 17 aa, Artificial Sequence
  Synthetically generated peptide
  VARIANT (1)..(17): Xaa = Any Amino Acid
ACELCAXNXXPACTXGC

SEQ ID NO: 8395 - protein, 17 aa, Artificial Sequence
  Synthetically generated peptide
  VARIANT (1)..(17): Xaa = Any Amino Acid
ACELCAXNXXPACTGXC

SEQ ID NO: 8396 - protein, 16 aa, Artificial Sequence
  Synthetically generated peptide
  VARIANT (1)..(16): Xaa = Any Amino Acid
ACELCAXNXPXACTGC

SEQ ID NO: 8397 - protein, 17 aa, Artificial Sequence
  Synthetically generated peptide
  VARIANT (1)..(17): Xaa = Any Amino Acid
ACELCAXNXPXXACTGC

SEQ ID NO: 8398 - protein, 17 aa, Artificial Sequence
  Synthetically generated peptide
  VARIANT (1)..(17): Xaa = Any Amino Acid
ACELCAXNXPXAXCTGC

SEQ ID NO: 8399 - protein, 17 aa, Artificial Sequence
  Synthetically generated peptide
  VARIANT (1)..(17): Xaa = Any Amino Acid
ACELCAXNXPXACXTGC

SEQ ID NO: 8400 - protein, 17 aa, Artificial Sequence
  Synthetically generated peptide
  VARIANT (1)..(17): Xaa = Any Amino Acid
ACELCAXNXPXACTXGC

SEQ ID NO: 8401 - protein, 17 aa, Artificial Sequence
  Synthetically generated peptide
  VARIANT (1)..(17): Xaa = Any Amino Acid
ACELCAXNXPXACTGXC

SEQ ID NO: 8402 - protein, 16 aa, Artificial Sequence
  Synthetically generated peptide
  VARIANT (1)..(16): Xaa = Any Amino Acid
ACELCAXNXPAXCTGC

SEQ ID NO: 8403 - protein, 17 aa, Artificial Sequence
  Synthetically generated peptide
  VARIANT (1)..(17): Xaa = Any Amino Acid
ACELCAXNXPAXXCTGC

SEQ ID NO: 8404 - protein, 17 aa, Artificial Sequence
  Synthetically generated peptide
  VARIANT (1)..(17): Xaa = Any Amino Acid
ACELCAXNXPAXCXTGC

SEQ ID NO: 8405 - protein, 17 aa, Artificial Sequence
  Synthetically generated peptide
  VARIANT (1)..(17): Xaa = Any Amino Acid
ACELCAXNXPAXCTXGC

SEQ ID NO: 8406 - protein, 17 aa, Artificial Sequence
  Synthetically generated peptide
  VARIANT (1)..(17): Xaa = Any Amino Acid
ACELCAXNXPAXCTGXC

SEQ ID NO: 8407 - protein, 16 aa, Artificial Sequence
  Synthetically generated peptide
  VARIANT (1)..(16): Xaa = Any Amino Acid
ACELCAXNXPACXTGC

SEQ ID NO: 8408 - protein, 17 aa, Artificial Sequence
  Synthetically generated peptide
  VARIANT (1)..(17): Xaa = Any Amino Acid
ACELCAXNXPACXXTGC

SEQ ID NO: 8409 - protein, 17 aa, Artificial Sequence
  Synthetically generated peptide
  VARIANT (1)..(17): Xaa = Any Amino Acid
ACELCAXNXPACXTXGC

SEQ ID NO: 8410 - protein, 17 aa, Artificial Sequence
  Synthetically generated peptide
  VARIANT (1)..(17): Xaa = Any Amino Acid
ACELCAXNXPACXTGXC

SEQ ID NO: 8411 - protein, 16 aa, Artificial Sequence
  Synthetically generated peptide
  VARIANT (1)..(16): Xaa = Any Amino Acid
ACELCAXNXPACTXGC

SEQ ID NO: 8412 - protein, 17 aa, Artificial Sequence
  Synthetically generated peptide
  VARIANT (1)..(17): Xaa = Any Amino Acid
ACELCAXNXPACTXXGC

SEQ ID NO: 8413 - protein, 17 aa, Artificial Sequence
  Synthetically generated peptide
  VARIANT (1)..(17): Xaa = Any Amino Acid
ACELCAXNXPACTXGXC

SEQ ID NO: 8414 - protein, 16 aa, Artificial Sequence
  Synthetically generated peptide
  VARIANT (1)..(16): Xaa = Any Amino Acid
ACELCAXNXPACTGXC

SEQ ID NO: 8415 - protein, 17 aa, Artificial Sequence
  Synthetically generated peptide
  VARIANT (1)..(17): Xaa = Any Amino Acid
ACELCAXNXPACTGXXC

SEQ ID NO: 8416 - protein, 15 aa, Artificial Sequence
  Synthetically generated peptide
  VARIANT (1)..(15): Xaa = Any Amino Acid
ACELCAXNPXACTGC

SEQ ID NO: 8417 - protein, 16 aa, Artificial Sequence
  Synthetically generated peptide
  VARIANT (1)..(16): Xaa = Any Amino Acid
ACELCAXNPXXACTGC

SEQ ID NO: 8418 - protein, 17 aa, Artificial Sequence
  Synthetically generated peptide
  VARIANT (1)..(17): Xaa = Any Amino Acid
ACELCAXNPXXXACTGC

SEQ ID NO: 8419 - protein, 17 aa, Artificial Sequence
  Synthetically generated peptide
  VARIANT (1)..(17): Xaa = Any Amino Acid
ACELCAXNPXXAXCTGC

SEQ ID NO: 8420 - protein, 17 aa, Artificial Sequence
  Synthetically generated peptide
  VARIANT (1)..(17): Xaa = Any Amino Acid
ACELCAXNPXXACXTGC

SEQ ID NO: 8421 - protein, 17 aa, Artificial Sequence
  Synthetically generated peptide
  VARIANT (1)..(17): Xaa = Any Amino Acid
ACELCAXNPXXACTXGC

SEQ ID NO: 8422 - protein, 17 aa, Artificial Sequence
  Synthetically generated peptide
  VARIANT (1)..(17): Xaa = Any Amino Acid
ACELCAXNPXXACTGXC

SEQ ID NO: 8423 - protein, 16 aa, Artificial Sequence
  Synthetically generated peptide
  VARIANT (1)..(16): Xaa = Any Amino Acid
ACELCAXNPXAXCTGC

SEQ ID NO: 8424 - protein, 17 aa, Artificial Sequence
  Synthetically generated peptide
  VARIANT (1)..(17): Xaa = Any Amino Acid
ACELCAXNPXAXXCTGC

SEQ ID NO: 8425 - protein, 17 aa, Artificial Sequence
  Synthetically generated peptide
  VARIANT (1)..(17): Xaa = Any Amino Acid
ACELCAXNPXAXCXTGC

SEQ ID NO: 8426 - protein, 17 aa, Artificial Sequence
  Synthetically generated peptide
  VARIANT (1)..(17): Xaa = Any Amino Acid
ACELCAXNPXAXCTXGC

SEQ ID NO: 8427 - protein, 17 aa, Artificial Sequence
  Synthetically generated peptide
  VARIANT (1)..(17): Xaa = Any Amino Acid
ACELCAXNPXAXCTGXC

SEQ ID NO: 8428 - protein, 16 aa, Artificial Sequence
  Synthetically generated peptide
  VARIANT (1)..(16): Xaa = Any Amino Acid
ACELCAXNPXACXTGC

SEQ ID NO: 8429 - protein, 17 aa, Artificial Sequence
  Synthetically generated peptide
  VARIANT (1)..(17): Xaa = Any Amino Acid
ACELCAXNPXACXXTGC

SEQ ID NO: 8430 - protein, 17 aa, Artificial Sequence
  Synthetically generated peptide
  VARIANT (1)..(17): Xaa = Any Amino Acid
ACELCAXNPXACXTXGC

SEQ ID NO: 8431 - protein, 17 aa, Artificial Sequence
  Synthetically generated peptide
  VARIANT (1)..(17): Xaa = Any Amino Acid
ACELCAXNPXACXTGXC

SEQ ID NO: 8432 - protein, 16 aa, Artificial Sequence
  Synthetically generated peptide
  VARIANT (1)..(16): Xaa = Any Amino Acid
ACELCAXNPXACTXGC

SEQ ID NO: 8433 - protein, 17 aa, Artificial Sequence
  Synthetically generated peptide
  VARIANT (1)..(17): Xaa = Any Amino Acid
ACELCAXNPXACTXXGC

SEQ ID NO: 8434 - protein, 17 aa, Artificial Sequence
  Synthetically generated peptide
  VARIANT (1)..(17): Xaa = Any Amino Acid
ACELCAXNPXACTXGXC

SEQ ID NO: 8435 - protein, 16 aa, Artificial Sequence
  Synthetically generated peptide
  VARIANT (1)..(16): Xaa = Any Amino Acid
ACELCAXNPXACTGXC

SEQ ID NO: 8436 - protein, 17 aa, Artificial Sequence
  Synthetically generated peptide
  VARIANT (1)..(17): Xaa = Any Amino Acid
ACELCAXNPXACTGXXC

SEQ ID NO: 8437 - protein, 15 aa, Artificial Sequence
  Synthetically generated peptide
  VARIANT (1)..(15): Xaa = Any Amino Acid
ACELCAXNPAXCTGC

SEQ ID NO: 8438 - protein, 16 aa, Artificial Sequence
  Synthetically generated peptide
  VARIANT (1)..(16): Xaa = Any Amino Acid
ACELCAXNPAXXCTGC

SEQ ID NO: 8439 - protein, 17 aa, Artificial Sequence
  Synthetically generated peptide
  VARIANT (1)..(17): Xaa = Any Amino Acid
ACELCAXNPAXXXCTGC

SEQ ID NO: 8440 - protein, 17 aa, Artificial Sequence
  Synthetically generated peptide
  VARIANT (1)..(17): Xaa = Any Amino Acid
ACELCAXNPAXXCXTGC

SEQ ID NO: 8441 - protein, 17 aa, Artificial Sequence
  Synthetically generated peptide
  VARIANT (1)..(17): Xaa = Any Amino Acid
ACELCAXNPAXXCTXGC

SEQ ID NO: 8442 - protein, 17 aa, Artificial Sequence
  Synthetically generated peptide
  VARIANT (1)..(17): Xaa = Any Amino Acid
ACELCAXNPAXXCTGXC

SEQ ID NO: 8443 - protein, 16 aa, Artificial Sequence
  Synthetically generated peptide
  VARIANT (1)..(16): Xaa = Any Amino Acid
ACELCAXNPAXCXTGC

SEQ ID NO: 8444 - protein, 17 aa, Artificial Sequence
  Synthetically generated peptide
  VARIANT (1)..(17): Xaa = Any Amino Acid
ACELCAXNPAXCXXTGC

SEQ ID NO: 8445 - protein, 17 aa, Artificial Sequence
  Synthetically generated peptide
  VARIANT (1)..(17): Xaa = Any Amino Acid
ACELCAXNPAXCXTXGC

SEQ ID NO: 8446 - protein, 17 aa, Artificial Sequence
  Synthetically generated peptide
  VARIANT (1)..(17): Xaa = Any Amino Acid
ACELCAXNPAXCXTGXC

SEQ ID NO: 8447 - protein, 16 aa, Artificial Sequence
  Synthetically generated peptide
  VARIANT (1)..(16): Xaa = Any Amino Acid
ACELCAXNPAXCTXGC

SEQ ID NO: 8448 - protein, 17 aa, Artificial Sequence
  Synthetically generated peptide
  VARIANT (1)..(17): Xaa = Any Amino Acid
ACELCAXNPAXCTXXGC

SEQ ID NO: 8449 - protein, 17 aa, Artificial Sequence
  Synthetically generated peptide
  VARIANT (1)..(17): Xaa = Any Amino Acid
ACELCAXNPAXCTXGXC

SEQ ID NO: 8450 - protein, 16 aa, Artificial Sequence
  Synthetically generated peptide
  VARIANT (1)..(16): Xaa = Any Amino Acid
ACELCAXNPAXCTGXC

SEQ ID NO: 8451 - protein, 17 aa, Artificial Sequence
  Synthetically generated peptide
  VARIANT (1)..(17): Xaa = Any Amino Acid
ACELCAXNPAXCTGXXC

SEQ ID NO: 8452 - protein, 15 aa, Artificial Sequence
  Synthetically generated peptide
  VARIANT (1)..(15): Xaa = Any Amino Acid
ACELCAXNPACXTGC

SEQ ID NO: 8453 - protein, 16 aa, Artificial Sequence
  Synthetically generated peptide
  VARIANT (1)..(16): Xaa = Any Amino Acid
ACELCAXNPACXXTGC

SEQ ID NO: 8454 - protein, 17 aa, Artificial Sequence
  Synthetically generated peptide
  VARIANT (1)..(17): Xaa = Any Amino Acid
ACELCAXNPACXXXTGC

SEQ ID NO: 8455 - protein, 17 aa, Artificial Sequence
  Synthetically generated peptide
  VARIANT (1)..(17): Xaa = Any Amino Acid
ACELCAXNPACXXTXGC

SEQ ID NO: 8456 - protein, 17 aa, Artificial Sequence
  Synthetically generated peptide
  VARIANT (1)..(17): Xaa = Any Amino Acid
ACELCAXNPACXXTGXC

SEQ ID NO: 8457 - protein, 16 aa, Artificial Sequence
  Synthetically generated peptide
  VARIANT (1)..(16): Xaa = Any Amino Acid
ACELCAXNPACXTXGC

SEQ ID NO: 8458 - protein, 17 aa, Artificial Sequence
  Synthetically generated peptide
  VARIANT (1)..(17): Xaa = Any Amino Acid
ACELCAXNPACXTXXGC

SEQ ID NO: 8459 - protein, 17 aa, Artificial Sequence
  Synthetically generated peptide
  VARIANT (1)..(17): Xaa = Any Amino Acid
ACELCAXNPACXTXGXC

SEQ ID NO: 8460 - protein, 16 aa, Artificial Sequence
  Synthetically generated peptide
  VARIANT (1)..(16): Xaa = Any Amino Acid
ACELCAXNPACXTGXC

SEQ ID NO: 8461 - protein, 17 aa, Artificial Sequence
  Synthetically generated peptide
  VARIANT (1)..(17): Xaa = Any Amino Acid
ACELCAXNPACXTGXXC

SEQ ID NO: 8462 - protein, 15 aa, Artificial Sequence
  Synthetically generated peptide
  VARIANT (1)..(15): Xaa = Any Amino Acid
ACELCAXNPACTXGC

SEQ ID NO: 8463 - protein, 16 aa, Artificial Sequence
  Synthetically generated peptide
  VARIANT (1)..(16): Xaa = Any Amino Acid
ACELCAXNPACTXXGC

SEQ ID NO: 8464 - protein, 17 aa, Artificial Sequence
  Synthetically generated peptide
  VARIANT (1)..(17): Xaa = Any Amino Acid
ACELCAXNPACTXXXGC

SEQ ID NO: 8465 - protein, 17 aa, Artificial Sequence
  Synthetically generated peptide
  VARIANT (1)..(17): Xaa = Any Amino Acid
ACELCAXNPACTXXGXC

SEQ ID NO: 8466 - protein, 16 aa, Artificial Sequence
  Synthetically generated peptide
  VARIANT (1)..(16): Xaa = Any Amino Acid
ACELCAXNPACTXGXC

SEQ ID NO: 8467 - protein, 17 aa, Artificial Sequence
  Synthetically generated peptide
  VARIANT (1)..(17): Xaa = Any Amino Acid
ACELCAXNPACTXGXXC

SEQ ID NO: 8468 - protein, 15 aa, Artificial Sequence
  Synthetically generated peptide
  VARIANT (1)..(15): Xaa = Any Amino Acid
ACELCAXNPACTGXC

SEQ ID NO: 8469 - protein, 16 aa, Artificial Sequence
  Synthetically generated peptide
  VARIANT (1)..(16): Xaa = Any Amino Acid
ACELCAXNPACTGXXC

SEQ ID NO: 8470 - protein, 17 aa, Artificial Sequence
  Synthetically generated peptide
  VARIANT (1)..(17): Xaa = Any Amino Acid
ACELCAXNPACTGXXXC

SEQ ID NO: 8471 - protein, 14 aa, Artificial Sequence
  Synthetically generated peptide
  VARIANT (1)..(14): Xaa = Any Amino Acid
ACELCANXPACTGC

SEQ ID NO: 8472 - protein, 15 aa, Artificial Sequence
  Synthetically generated peptide
  VARIANT (1)..(15): Xaa = Any Amino Acid
ACELCANXXPACTGC

SEQ ID NO: 8473 - protein, 16 aa, Artificial Sequence
  Synthetically generated peptide
  VARIANT (1)..(16): Xaa = Any Amino Acid
ACELCANXXXPACTGC

SEQ ID NO: 8474 - protein, 17 aa, Artificial Sequence
  Synthetically generated peptide
  VARIANT (1)..(17): Xaa = Any Amino Acid
ACELCANXXXXPACTGC

SEQ ID NO: 8475 - protein, 17 aa, Artificial Sequence
  Synthetically generated peptide
  VARIANT (1)..(17): Xaa = Any Amino Acid
ACELCANXXXPXACTGC

SEQ ID NO: 8476 - protein, 17 aa, Artificial Sequence
  Synthetically generated peptide
  VARIANT (1)..(17): Xaa = Any Amino Acid
ACELCANXXXPAXCTGC

SEQ ID NO: 8477 - protein, 17 aa, Artificial Sequence
  Synthetically generated peptide
  VARIANT (1)..(17): Xaa = Any Amino Acid
ACELCANXXXPACXTGC

SEQ ID NO: 8478 - protein, 17 aa, Artificial Sequence
  Synthetically generated peptide
  VARIANT (1)..(17): Xaa = Any Amino Acid
ACELCANXXXPACTXGC

SEQ ID NO: 8479 - protein, 17 aa, Artificial Sequence
  Synthetically generated peptide
  VARIANT (1)..(17): Xaa = Any Amino Acid
ACELCANXXXPACTGXC

SEQ ID NO: 8480 - protein, 16 aa, Artificial Sequence
  Synthetically generated peptide
  VARIANT (1)..(16): Xaa = Any Amino Acid
ACELCANXXPXACTGC

SEQ ID NO: 8481 - protein, 17 aa, Artificial Sequence
  Synthetically generated peptide
  VARIANT (1)..(17): Xaa = Any Amino Acid
ACELCANXXPXXACTGC

SEQ ID NO: 8482 - protein, 17 aa, Artificial Sequence
  Synthetically generated peptide
  VARIANT (1)..(17): Xaa = Any Amino Acid
ACELCANXXPXAXCTGC

SEQ ID NO: 8483 - protein, 17 aa, Artificial Sequence
  Synthetically generated peptide
  VARIANT (1)..(17): Xaa = Any Amino Acid
ACELCANXXPXACXTGC

SEQ ID NO: 8484 - protein, 17 aa, Artificial Sequence
  Synthetically generated peptide
  VARIANT (1)..(17): Xaa = Any Amino Acid
ACELCANXXPXACTXGC

SEQ ID NO: 8485 - protein, 17 aa, Artificial Sequence
  Synthetically generated peptide
  VARIANT (1)..(17): Xaa = Any Amino Acid
ACELCANXXPXACTGXC

SEQ ID NO: 8486 - protein, 16 aa, Artificial Sequence
  Synthetically generated peptide
  VARIANT (1)..(16): Xaa = Any Amino Acid
ACELCANXXPAXCTGC

SEQ ID NO: 8487 - protein, 17 aa, Artificial Sequence
  Synthetically generated peptide
  VARIANT (1)..(17): Xaa = Any Amino Acid
ACELCANXXPAXXCTGC

SEQ ID NO: 8488 - protein, 17 aa, Artificial Sequence
  Synthetically generated peptide
  VARIANT (1)..(17): Xaa = Any Amino Acid
ACELCANXXPAXCXTGC

SEQ ID NO: 8489 - protein, 17 aa, Artificial Sequence
  Synthetically generated peptide
  VARIANT (1)..(17): Xaa = Any Amino Acid
ACELCANXXPAXCTXGC

SEQ ID NO: 8490 - protein, 17 aa, Artificial Sequence
  Synthetically generated peptide
  VARIANT (1)..(17): Xaa = Any Amino Acid
ACELCANXXPAXCTGXC

SEQ ID NO: 8491 - protein, 16 aa, Artificial Sequence
  Synthetically generated peptide
  VARIANT (1)..(16): Xaa = Any Amino Acid
ACELCANXXPACXTGC

SEQ ID NO: 8492 - protein, 17 aa, Artificial Sequence
  Synthetically generated peptide
  VARIANT (1)..(17): Xaa = Any Amino Acid
ACELCANXXPACXXTGC

SEQ ID NO: 8493 - protein, 17 aa, Artificial Sequence
  Synthetically generated peptide
  VARIANT (1)..(17): Xaa = Any Amino Acid
ACELCANXXPACXTXGC

SEQ ID NO: 8494 - protein, 17 aa, Artificial Sequence
  Synthetically generated peptide
  VARIANT (1)..(17): Xaa = Any Amino Acid
ACELCANXXPACXTGXC

SEQ ID NO: 8495 - protein, 16 aa, Artificial Sequence
  Synthetically generated peptide
  VARIANT (1)..(16): Xaa = Any Amino Acid
ACELCANXXPACTXGC

SEQ ID NO: 8496 - protein, 17 aa, Artificial Sequence
  Synthetically generated peptide
  VARIANT (1)..(17): Xaa = Any Amino Acid
ACELCANXXPACTXXGC

SEQ ID NO: 8497 - protein, 17 aa, Artificial Sequence
  Synthetically generated peptide
  VARIANT (1)..(17): Xaa = Any Amino Acid
ACELCANXXPACTXGXC

SEQ ID NO: 8498 - protein, 16 aa, Artificial Sequence
  Synthetically generated peptide
  VARIANT (1)..(16): Xaa = Any Amino Acid
ACELCANXXPACTGXC

SEQ ID NO: 8499 - protein, 17 aa, Artificial Sequence
  Synthetically generated peptide
  VARIANT (1)..(17): Xaa = Any Amino Acid
ACELCANXXPACTGXXC

SEQ ID NO: 8500 - protein, 15 aa, Artificial Sequence
  Synthetically generated peptide
  VARIANT (1)..(15): Xaa = Any Amino Acid
ACELCANXPXACTGC

SEQ ID NO: 8501 - protein, 16 aa, Artificial Sequence
  Synthetically generated peptide
  VARIANT (1)..(16): Xaa = Any Amino Acid
ACELCANXPXXACTGC

SEQ ID NO: 8502 - protein, 17 aa, Artificial Sequence
  Synthetically generated peptide
  VARIANT (1)..(17): Xaa = Any Amino Acid
ACELCANXPXXXACTGC

SEQ ID NO: 8503 - protein, 17 aa, Artificial Sequence
  Synthetically generated peptide
  VARIANT (1)..(17): Xaa = Any Amino Acid
ACELCANXPXXAXCTGC

SEQ ID NO: 8504 - protein, 17 aa, Artificial Sequence
  Synthetically generated peptide
  VARIANT (1)..(17): Xaa = Any Amino Acid
ACELCANXPXXACXTGC

SEQ ID NO: 8505 - protein, 17 aa, Artificial Sequence
  Synthetically generated peptide
  VARIANT (1)..(17): Xaa = Any Amino Acid
ACELCANXPXXACTXGC

SEQ ID NO: 8506 - protein, 17 aa, Artificial Sequence
  Synthetically generated peptide
  VARIANT (1)..(17): Xaa = Any Amino Acid
ACELCANXPXXACTGXC

SEQ ID NO: 8507 - protein, 16 aa, Artificial Sequence
  Synthetically generated peptide
  VARIANT (1)..(16): Xaa = Any Amino Acid
ACELCANXPXAXCTGC

SEQ ID NO: 8508 - protein, 17 aa, Artificial Sequence
  Synthetically generated peptide
  VARIANT (1)..(17): Xaa = Any Amino Acid
ACELCANXPXAXXCTGC

SEQ ID NO: 8509 - protein, 17 aa, Artificial Sequence
  Synthetically generated peptide
  VARIANT (1)..(17): Xaa = Any Amino Acid
ACELCANXPXAXCXTGC

SEQ ID NO: 8510 - protein, 17 aa, Artificial Sequence
  Synthetically generated peptide
  VARIANT (1)..(17): Xaa = Any Amino Acid
ACELCANXPXAXCTXGC

SEQ ID NO: 8511 - protein, 17 aa, Artificial Sequence
  Synthetically generated peptide
  VARIANT (1)..(17): Xaa = Any Amino Acid
ACELCANXPXAXCTGXC

SEQ ID NO: 8512 - protein, 16 aa, Artificial Sequence
  Synthetically generated peptide
  VARIANT (1)..(16): Xaa = Any Amino Acid
ACELCANXPXACXTGC

SEQ ID NO: 8513 - protein, 17 aa, Artificial Sequence
  Synthetically generated peptide
  VARIANT (1)..(17): Xaa = Any Amino Acid
ACELCANXPXACXXTGC

SEQ ID NO: 8514 - protein, 17 aa, Artificial Sequence
  Synthetically generated peptide
  VARIANT (1)..(17): Xaa = Any Amino Acid
ACELCANXPXACXTXGC

SEQ ID NO: 8515 - protein, 17 aa, Artificial Sequence
  Synthetically generated peptide
  VARIANT (1)..(17): Xaa = Any Amino Acid
ACELCANXPXACXTGXC

SEQ ID NO: 8516 - protein, 16 aa, Artificial Sequence
  Synthetically generated peptide
  VARIANT (1)..(16): Xaa = Any Amino Acid
ACELCANXPXACTXGC

SEQ ID NO: 8517 - protein, 17 aa, Artificial Sequence
  Synthetically generated peptide
  VARIANT (1)..(17): Xaa = Any Amino Acid
ACELCANXPXACTXXGC

SEQ ID NO: 8518 - protein, 17 aa, Artificial Sequence
  Synthetically generated peptide
  VARIANT (1)..(17): Xaa = Any Amino Acid
ACELCANXPXACTXGXC

SEQ ID NO: 8519 - protein, 16 aa, Artificial Sequence
  Synthetically generated peptide
  VARIANT (1)..(16): Xaa = Any Amino Acid
ACELCANXPXACTGXC

SEQ ID NO: 8520 - protein, 17 aa, Artificial Sequence
  Synthetically generated peptide
  VARIANT (1)..(17): Xaa = Any Amino Acid
ACELCANXPXACTGXXC

SEQ ID NO: 8521 - protein, 15 aa, Artificial Sequence
  Synthetically generated peptide
  VARIANT (1)..(15): Xaa = Any Amino Acid
ACELCANXPAXCTGC

SEQ ID NO: 8522 - protein, 16 aa, Artificial Sequence
  Synthetically generated peptide
  VARIANT (1)..(16): Xaa = Any Amino Acid
ACELCANXPAXXCTGC

SEQ ID NO: 8523 - protein, 17 aa, Artificial Sequence
  Synthetically generated peptide
  VARIANT (1)..(17): Xaa = Any Amino Acid
ACELCANXPAXXXCTGC

SEQ ID NO: 8524 - protein, 17 aa, Artificial Sequence
  Synthetically generated peptide
  VARIANT (1)..(17): Xaa = Any Amino Acid
ACELCANXPAXXCXTGC

SEQ ID NO: 8525 - protein, 17 aa, Artificial Sequence
  Synthetically generated peptide
  VARIANT (1)..(17): Xaa = Any Amino Acid
ACELCANXPAXXCTXGC

SEQ ID NO: 8526 - protein, 17 aa, Artificial Sequence
  Synthetically generated peptide
  VARIANT (1)..(17): Xaa = Any Amino Acid
ACELCANXPAXXCTGXC

SEQ ID NO: 8527 - protein, 16 aa, Artificial Sequence
  Synthetically generated peptide
  VARIANT (1)..(16): Xaa = Any Amino Acid
ACELCANXPAXCXTGC

SEQ ID NO: 8528 - protein, 17 aa, Artificial Sequence
  Synthetically generated peptide
  VARIANT (1)..(17): Xaa = Any Amino Acid
ACELCANXPAXCXXTGC

SEQ ID NO: 8529 - protein, 17 aa, Artificial Sequence
  Synthetically generated peptide
  VARIANT (1)..(17): Xaa = Any Amino Acid
ACELCANXPAXCXTXGC

SEQ ID NO: 8530 - protein, 17 aa, Artificial Sequence
  Synthetically generated peptide
  VARIANT (1)..(17): Xaa = Any Amino Acid
ACELCANXPAXCXTGXC

SEQ ID NO: 8531 - protein, 16 aa, Artificial Sequence
  Synthetically generated peptide
  VARIANT (1)..(16): Xaa = Any Amino Acid
ACELCANXPAXCTXGC

SEQ ID NO: 8532 - protein, 17 aa, Artificial Sequence
  Synthetically generated peptide
  VARIANT (1)..(17): Xaa = Any Amino Acid
ACELCANXPAXCTXXGC

SEQ ID NO: 8533 - protein, 17 aa, Artificial Sequence
  Synthetically generated peptide
  VARIANT (1)..(17): Xaa = Any Amino Acid
ACELCANXPAXCTXGXC

SEQ ID NO: 8534 - protein, 16 aa, Artificial Sequence
  Synthetically generated peptide
  VARIANT (1)..(16): Xaa = Any Amino Acid
ACELCANXPAXCTGXC

SEQ ID NO: 8535 - protein, 17 aa, Artificial Sequence
  Synthetically generated peptide
  VARIANT (1)..(17): Xaa = Any Amino Acid
ACELCANXPAXCTGXXC

SEQ ID NO: 8536 - protein, 15 aa, Artificial Sequence
  Synthetically generated peptide
  VARIANT (1)..(15): Xaa = Any Amino Acid
ACELCANXPACXTGC

SEQ ID NO: 8537 - protein, 16 aa, Artificial Sequence
  Synthetically generated peptide
  VARIANT (1)..(16): Xaa = Any Amino Acid
ACELCANXPACXXTGC

SEQ ID NO: 8538 - protein, 17 aa, Artificial Sequence
  Synthetically generated peptide
  VARIANT (1)..(17): Xaa = Any Amino Acid
ACELCANXPACXXXTGC

SEQ ID NO: 8539 - protein, 17 aa, Artificial Sequence
  Synthetically generated peptide
  VARIANT (1)..(17): Xaa = Any Amino Acid
ACELCANXPACXXTXGC

SEQ ID NO: 8540 - protein, 17 aa, Artificial Sequence
  Synthetically generated peptide
  VARIANT (1)..(17): Xaa = Any Amino Acid
ACELCANXPACXXTGXC

SEQ ID NO: 8541 - protein, 16 aa, Artificial Sequence
  Synthetically generated peptide
  VARIANT (1)..(16): Xaa = Any Amino Acid
ACELCANXPACXTXGC

SEQ ID NO: 8542 - protein, 17 aa, Artificial Sequence
  Synthetically generated peptide
  VARIANT (1)..(17): Xaa = Any Amino Acid
ACELCANXPACXTXXGC

SEQ ID NO: 8543 - protein, 17 aa, Artificial Sequence
  Synthetically generated peptide
  VARIANT (1)..(17): Xaa = Any Amino Acid
ACELCANXPACXTXGXC

SEQ ID NO: 8544 - protein, 16 aa, Artificial Sequence
  Synthetically generated peptide
  VARIANT (1)..(16): Xaa = Any Amino Acid
ACELCANXPACXTGXC

SEQ ID NO: 8545 - protein, 17 aa, Artificial Sequence
  Synthetically generated peptide
  VARIANT (1)..(17): Xaa = Any Amino Acid
ACELCANXPACXTGXXC

SEQ ID NO: 8546 - protein, 15 aa, Artificial Sequence
  Synthetically generated peptide
  VARIANT (1)..(15): Xaa = Any Amino Acid
ACELCANXPACTXGC

SEQ ID NO: 8547 - protein, 16 aa, Artificial Sequence
  Synthetically generated peptide
  VARIANT (1)..(16): Xaa = Any Amino Acid
ACELCANXPACTXXGC

SEQ ID NO: 8548 - protein, 17 aa, Artificial Sequence
  Synthetically generated peptide
  VARIANT (1)..(17): Xaa = Any Amino Acid
ACELCANXPACTXXXGC

SEQ ID NO: 8549 - protein, 17 aa, Artificial Sequence
  Synthetically generated peptide
  VARIANT (1)..(17): Xaa = Any Amino Acid
ACELCANXPACTXXGXC

SEQ ID NO: 8550 - protein, 16 aa, Artificial Sequence
  Synthetically generated peptide
  VARIANT (1)..(16): Xaa = Any Amino Acid
ACELCANXPACTXGXC

SEQ ID NO: 8551 - protein, 17 aa, Artificial Sequence
  Synthetically generated peptide
  VARIANT (1)..(17): Xaa = Any Amino Acid
ACELCANXPACTXGXXC

SEQ ID NO: 8552 - protein, 15 aa, Artificial Sequence
  Synthetically generated peptide
  VARIANT (1)..(15): Xaa = Any Amino Acid
ACELCANXPACTGXC

SEQ ID NO: 8553 - protein, 16 aa, Artificial Sequence
  Synthetically generated peptide
  VARIANT (1)..(16): Xaa = Any Amino Acid
ACELCANXPACTGXXC

SEQ ID NO: 8554 - protein, 17 aa, Artificial Sequence
  Synthetically generated peptide
  VARIANT (1)..(17): Xaa = Any Amino Acid
ACELCANXPACTGXXXC

SEQ ID NO: 8555 - protein, 14 aa, Artificial Sequence
  Synthetically generated peptide
  VARIANT (1)..(14): Xaa = Any Amino Acid
ACELCANPXACTGC

SEQ ID NO: 8556 - protein, 15 aa, Artificial Sequence
  Synthetically generated peptide
  VARIANT (1)..(15): Xaa = Any Amino Acid
ACELCANPXXACTGC

SEQ ID NO: 8557 - protein, 16 aa, Artificial Sequence
  Synthetically generated peptide
  VARIANT (1)..(16): Xaa = Any Amino Acid
ACELCANPXXXACTGC

SEQ ID NO: 8558 - protein, 17 aa, Artificial Sequence
  Synthetically generated peptide
  VARIANT (1)..(17): Xaa = Any Amino Acid
ACELCANPXXXXACTGC

SEQ ID NO: 8559 - protein, 17 aa, Artificial Sequence
  Synthetically generated peptide
  VARIANT (1)..(17): Xaa = Any Amino Acid
ACELCANPXXXAXCTGC

SEQ ID NO: 8560 - protein, 17 aa, Artificial Sequence
  Synthetically generated peptide
  VARIANT (1)..(17): Xaa = Any Amino Acid
ACELCANPXXXACXTGC

SEQ ID NO: 8561 - protein, 17 aa, Artificial Sequence
  Synthetically generated peptide
  VARIANT (1)..(17): Xaa = Any Amino Acid
ACELCANPXXXACTXGC

SEQ ID NO: 8562 - protein, 17 aa, Artificial Sequence
  Synthetically generated peptide
  VARIANT (1)..(17): Xaa = Any Amino Acid
ACELCANPXXXACTGXC

SEQ ID NO: 8563 - protein, 16 aa, Artificial Sequence
  Synthetically generated peptide
  VARIANT (1)..(16): Xaa = Any Amino Acid
ACELCANPXXAXCTGC

SEQ ID NO: 8564 - protein, 17 aa, Artificial Sequence
  Synthetically generated peptide
  VARIANT (1)..(17): Xaa = Any Amino Acid
ACELCANPXXAXXCTGC

SEQ ID NO: 8565 - protein, 17 aa, Artificial Sequence
  Synthetically generated peptide
  VARIANT (1)..(17): Xaa = Any Amino Acid
ACELCANPXXAXCXTGC

SEQ ID NO: 8566 - protein, 17 aa, Artificial Sequence
  Synthetically generated peptide
  VARIANT (1)..(17): Xaa = Any Amino Acid
ACELCANPXXAXCTXGC

SEQ ID NO: 8567 - protein, 17 aa, Artificial Sequence
  Synthetically generated peptide
  VARIANT (1)..(17): Xaa = Any Amino Acid
ACELCANPXXAXCTGXC

SEQ ID NO: 8568 - protein, 16 aa, Artificial Sequence
  Synthetically generated peptide
  VARIANT (1)..(16): Xaa = Any Amino Acid
ACELCANPXXACXTGC

SEQ ID NO: 8569 - protein, 17 aa, Artificial Sequence
  Synthetically generated peptide
  VARIANT (1)..(17): Xaa = Any Amino Acid
ACELCANPXXACXXTGC

SEQ ID NO: 8570 - protein, 17 aa, Artificial Sequence
  Synthetically generated peptide
  VARIANT (1)..(17): Xaa = Any Amino Acid
ACELCANPXXACXTXGC

SEQ ID NO: 8571 - protein, 17 aa, Artificial Sequence
  Synthetically generated peptide
  VARIANT (1)..(17): Xaa = Any Amino Acid
ACELCANPXXACXTGXC

SEQ ID NO: 8572 - protein, 16 aa, Artificial Sequence
  Synthetically generated peptide
  VARIANT (1)..(16): Xaa = Any Amino Acid
ACELCANPXXACTXGC

SEQ ID NO: 8573 - protein, 17 aa, Artificial Sequence
  Synthetically generated peptide
  VARIANT (1)..(17): Xaa = Any Amino Acid
ACELCANPXXACTXXGC

SEQ ID NO: 8574 - protein, 17 aa, Artificial Sequence
  Synthetically generated peptide
  VARIANT (1)..(17): Xaa = Any Amino Acid
ACELCANPXXACTXGXC

SEQ ID NO: 8575 - protein, 16 aa, Artificial Sequence
  Synthetically generated peptide
  VARIANT (1)..(16): Xaa = Any Amino Acid
ACELCANPXXACTGXC

SEQ ID NO: 8576 - protein, 17 aa, Artificial Sequence
  Synthetically generated peptide
  VARIANT (1)..(17): Xaa = Any Amino Acid
ACELCANPXXACTGXXC

SEQ ID NO: 8577 - protein, 15 aa, Artificial Sequence
  Synthetically generated peptide
  VARIANT (1)..(15): Xaa = Any Amino Acid
ACELCANPXAXCTGC

SEQ ID NO: 8578 - protein, 16 aa, Artificial Sequence
  Synthetically generated peptide
  VARIANT (1)..(16): Xaa = Any Amino Acid
ACELCANPXAXXCTGC

SEQ ID NO: 8579 - protein, 17 aa, Artificial Sequence
  Synthetically generated peptide
  VARIANT (1)..(17): Xaa = Any Amino Acid
ACELCANPXAXXXCTGC

SEQ ID NO: 8580 - protein, 17 aa, Artificial Sequence
  Synthetically generated peptide
  VARIANT (1)..(17): Xaa = Any Amino Acid
ACELCANPXAXXCXTGC

SEQ ID NO: 8581 - protein, 17 aa, Artificial Sequence
  Synthetically generated peptide
  VARIANT (1)..(17): Xaa = Any Amino Acid
ACELCANPXAXXCTXGC

SEQ ID NO: 8582 - protein, 17 aa, Artificial Sequence
  Synthetically generated peptide
  VARIANT (1)..(17): Xaa = Any Amino Acid
ACELCANPXAXXCTGXC

SEQ ID NO: 8583 - protein, 16 aa, Artificial Sequence
  Synthetically generated peptide
  VARIANT (1)..(16): Xaa = Any Amino Acid
ACELCANPXAXCXTGC

SEQ ID NO: 8584 - protein, 17 aa, Artificial Sequence
  Synthetically generated peptide
  VARIANT (1)..(17): Xaa = Any Amino Acid
ACELCANPXAXCXXTGC

SEQ ID NO: 8585 - protein, 17 aa, Artificial Sequence
  Synthetically generated peptide
  VARIANT (1)..(17): Xaa = Any Amino Acid
ACELCANPXAXCXTXGC

SEQ ID NO: 8586 - protein, 17 aa, Artificial Sequence
  Synthetically generated peptide
  VARIANT (1)..(17): Xaa = Any Amino Acid
ACELCANPXAXCXTGXC

SEQ ID NO: 8587 - protein, 16 aa, Artificial Sequence
  Synthetically generated peptide
  VARIANT (1)..(16): Xaa = Any Amino Acid
ACELCANPXAXCTXGC

SEQ ID NO: 8588 - protein, 17 aa, Artificial Sequence
  Synthetically generated peptide
  VARIANT (1)..(17): Xaa = Any Amino Acid
ACELCANPXAXCTXXGC

SEQ ID NO: 8589 - protein, 17 aa, Artificial Sequence
  Synthetically generated peptide
  VARIANT (1)..(17): Xaa = Any Amino Acid
ACELCANPXAXCTXGXC

SEQ ID NO: 8590 - protein, 16 aa, Artificial Sequence
  Synthetically generated peptide
  VARIANT (1)..(16): Xaa = Any Amino Acid
ACELCANPXAXCTGXC

SEQ ID NO: 8591 - protein, 17 aa, Artificial Sequence
  Synthetically generated peptide
  VARIANT (1)..(17): Xaa = Any Amino Acid
ACELCANPXAXCTGXXC

SEQ ID NO: 8592 - protein, 15 aa, Artificial Sequence
  Synthetically generated peptide
  VARIANT (1)..(15): Xaa = Any Amino Acid
ACELCANPXACXTGC

SEQ ID NO: 8593 - protein, 16 aa, Artificial Sequence
  Synthetically generated peptide
  VARIANT (1)..(16): Xaa = Any Amino Acid
ACELCANPXACXXTGC

SEQ ID NO: 8594 - protein, 17 aa, Artificial Sequence
  Synthetically generated peptide
  VARIANT (1)..(17): Xaa = Any Amino Acid
ACELCANPXACXXXTGC

SEQ ID NO: 8595 - protein, 17 aa, Artificial Sequence
  Synthetically generated peptide
  VARIANT (1)..(17): Xaa = Any Amino Acid
ACELCANPXACXXTXGC

SEQ ID NO: 8596 - protein, 17 aa, Artificial Sequence
  Synthetically generated peptide
  VARIANT (1)..(17): Xaa = Any Amino Acid
ACELCANPXACXXTGXC

SEQ ID NO: 8597 - protein, 16 aa, Artificial Sequence
  Synthetically generated peptide
  VARIANT (1)..(16): Xaa = Any Amino Acid
ACELCANPXACXTXGC

SEQ ID NO: 8598 - protein, 17 aa, Artificial Sequence
  Synthetically generated peptide
  VARIANT (1)..(17): Xaa = Any Amino Acid
ACELCANPXACXTXXGC

SEQ ID NO: 8599 - protein, 17 aa, Artificial Sequence
  Synthetically generated peptide
  VARIANT (1)..(17): Xaa = Any Amino Acid
ACELCANPXACXTXGXC

SEQ ID NO: 8600 - protein, 16 aa, Artificial Sequence
  Synthetically generated peptide
  VARIANT (1)..(16): Xaa = Any Amino Acid
ACELCANPXACXTGXC

SEQ ID NO: 8601 - protein, 17 aa, Artificial Sequence
  Synthetically generated peptide
  VARIANT (1)..(17): Xaa = Any Amino Acid
ACELCANPXACXTGXXC

SEQ ID NO: 8602 - protein, 15 aa, Artificial Sequence
  Synthetically generated peptide
  VARIANT (1)..(15): Xaa = Any Amino Acid
ACELCANPXACTXGC

SEQ ID NO: 8603 - protein, 16 aa, Artificial Sequence
  Synthetically generated peptide
  VARIANT (1)..(16): Xaa = Any Amino Acid
ACELCANPXACTXXGC

SEQ ID NO: 8604 - protein, 17 aa, Artificial Sequence
  Synthetically generated peptide
  VARIANT (1)..(17): Xaa = Any Amino Acid
ACELCANPXACTXXXGC

SEQ ID NO: 8605 - protein, 17 aa, Artificial Sequence
  Synthetically generated peptide
  VARIANT (1)..(17): Xaa = Any Amino Acid
ACELCANPXACTXXGXC

SEQ ID NO: 8606 - protein, 16 aa, Artificial Sequence
  Synthetically generated peptide
  VARIANT (1)..(16): Xaa = Any Amino Acid
ACELCANPXACTXGXC

SEQ ID NO: 8607 - protein, 17 aa, Artificial Sequence
  Synthetically generated peptide
  VARIANT (1)..(17): Xaa = Any Amino Acid
ACELCANPXACTXGXXC

SEQ ID NO: 8608 - protein, 15 aa, Artificial Sequence
  Synthetically generated peptide
  VARIANT (1)..(15): Xaa = Any Amino Acid
ACELCANPXACTGXC

SEQ ID NO: 8609 - protein, 16 aa, Artificial Sequence
  Synthetically generated peptide
  VARIANT (1)..(16): Xaa = Any Amino Acid
ACELCANPXACTGXXC

SEQ ID NO: 8610 - protein, 17 aa, Artificial Sequence
  Synthetically generated peptide
  VARIANT (1)..(17): Xaa = Any Amino Acid
ACELCANPXACTGXXXC

SEQ ID NO: 8611 - protein, 14 aa, Artificial Sequence
  Synthetically generated peptide
  VARIANT (1)..(14): Xaa = Any Amino Acid
ACELCANPAXCTGC

SEQ ID NO: 8612 - protein, 15 aa, Artificial Sequence
  Synthetically generated peptide
  VARIANT (1)..(15): Xaa = Any Amino Acid
ACELCANPAXXCTGC

SEQ ID NO: 8613 - protein, 16 aa, Artificial Sequence
  Synthetically generated peptide
  VARIANT (1)..(16): Xaa = Any Amino Acid
ACELCANPAXXXCTGC

SEQ ID NO: 8614 - protein, 17 aa, Artificial Sequence
  Synthetically generated peptide
  VARIANT (1)..(17): Xaa = Any Amino Acid
ACELCANPAXXXXCTGC

SEQ ID NO: 8615 - protein, 17 aa, Artificial Sequence
  Synthetically generated peptide
  VARIANT (1)..(17): Xaa = Any Amino Acid
ACELCANPAXXXCXTGC

SEQ ID NO: 8616 - protein, 17 aa, Artificial Sequence
  Synthetically generated peptide
  VARIANT (1)..(17): Xaa = Any Amino Acid
ACELCANPAXXXCTXGC

SEQ ID NO: 8617 - protein, 17 aa, Artificial Sequence
  Synthetically generated peptide
  VARIANT (1)..(17): Xaa = Any Amino Acid
ACELCANPAXXXCTGXC

SEQ ID NO: 8618 - protein, 16 aa, Artificial Sequence
  Synthetically generated peptide
  VARIANT (1)..(16): Xaa = Any Amino Acid
ACELCANPAXXCXTGC

SEQ ID NO: 8619 - protein, 17 aa, Artificial Sequence
  Synthetically generated peptide
  VARIANT (1)..(17): Xaa = Any Amino Acid
ACELCANPAXXCXXTGC

SEQ ID NO: 8620 - protein, 17 aa, Artificial Sequence
  Synthetically generated peptide
  VARIANT (1)..(17): Xaa = Any Amino Acid
ACELCANPAXXCXTXGC

SEQ ID NO: 8621 - protein, 17 aa, Artificial Sequence
  Synthetically generated peptide
  VARIANT (1)..(17): Xaa = Any Amino Acid
ACELCANPAXXCXTGXC

SEQ ID NO: 8622 - protein, 16 aa, Artificial Sequence
  Synthetically generated peptide
  VARIANT (1)..(16): Xaa = Any Amino Acid
ACELCANPAXXCTXGC

SEQ ID NO: 8623 - protein, 17 aa, Artificial Sequence
  Synthetically generated peptide
  VARIANT (1)..(17): Xaa = Any Amino Acid
ACELCANPAXXCTXXGC

SEQ ID NO: 8624 - protein, 17 aa, Artificial Sequence
  Synthetically generated peptide
  VARIANT (1)..(17): Xaa = Any Amino Acid
ACELCANPAXXCTXGXC

SEQ ID NO: 8625 - protein, 16 aa, Artificial Sequence
  Synthetically generated peptide
  VARIANT (1)..(16): Xaa = Any Amino Acid
ACELCANPAXXCTGXC

SEQ ID NO: 8626 - protein, 17 aa, Artificial Sequence
  Synthetically generated peptide
  VARIANT (1)..(17): Xaa = Any Amino Acid
ACELCANPAXXCTGXXC

SEQ ID NO: 8627 - protein, 15 aa, Artificial Sequence
  Synthetically generated peptide
  VARIANT (1)..(15): Xaa = Any Amino Acid
ACELCANPAXCXTGC

SEQ ID NO: 8628 - protein, 16 aa, Artificial Sequence
  Synthetically generated peptide
  VARIANT (1)..(16): Xaa = Any Amino Acid
ACELCANPAXCXXTGC

SEQ ID NO: 8629 - protein, 17 aa, Artificial Sequence
  Synthetically generated peptide
  VARIANT (1)..(17): Xaa = Any Amino Acid
ACELCANPAXCXXXTGC

SEQ ID NO: 8630 - protein, 17 aa, Artificial Sequence
  Synthetically generated peptide
  VARIANT (1)..(17): Xaa = Any Amino Acid
ACELCANPAXCXXTXGC

SEQ ID NO: 8631 - protein, 17 aa, Artificial Sequence
  Synthetically generated peptide
  VARIANT (1)..(17): Xaa = Any Amino Acid
ACELCANPAXCXXTGXC

SEQ ID NO: 8632 - protein, 16 aa, Artificial Sequence
  Synthetically generated peptide
  VARIANT (1)..(16): Xaa = Any Amino Acid
ACELCANPAXCXTXGC

SEQ ID NO: 8633 - protein, 17 aa, Artificial Sequence
  Synthetically generated peptide
  VARIANT (1)..(17): Xaa = Any Amino Acid
ACELCANPAXCXTXXGC

SEQ ID NO: 8634 - protein, 17 aa, Artificial Sequence
  Synthetically generated peptide
  VARIANT (1)..(17): Xaa = Any Amino Acid
ACELCANPAXCXTXGXC

SEQ ID NO: 8635 - protein, 16 aa, Artificial Sequence
  Synthetically generated peptide
  VARIANT (1)..(16): Xaa = Any Amino Acid
ACELCANPAXCXTGXC

SEQ ID NO: 8636 - protein, 17 aa, Artificial Sequence
  Synthetically generated peptide
  VARIANT (1)..(17): Xaa = Any Amino Acid
ACELCANPAXCXTGXXC

SEQ ID NO: 8637 - protein, 15 aa, Artificial Sequence
  Synthetically generated peptide
  VARIANT (1)..(15): Xaa = Any Amino Acid
ACELCANPAXCTXGC

SEQ ID NO: 8638 - protein, 16 aa, Artificial Sequence
  Synthetically generated peptide
  VARIANT (1)..(16): Xaa = Any Amino Acid
ACELCANPAXCTXXGC

SEQ ID NO: 8639 - protein, 17 aa, Artificial Sequence
  Synthetically generated peptide
  VARIANT (1)..(17): Xaa = Any Amino Acid
ACELCANPAXCTXXXGC

SEQ ID NO: 8640 - protein, 17 aa, Artificial Sequence
  Synthetically generated peptide
  VARIANT (1)..(17): Xaa = Any Amino Acid
ACELCANPAXCTXXGXC

SEQ ID NO: 8641 - protein, 16 aa, Artificial Sequence
  Synthetically generated peptide
  VARIANT (1)..(16): Xaa = Any Amino Acid
ACELCANPAXCTXGXC

SEQ ID NO: 8642 - protein, 17 aa, Artificial Sequence
  Synthetically generated peptide
  VARIANT (1)..(17): Xaa = Any Amino Acid
ACELCANPAXCTXGXXC

SEQ ID NO: 8643 - protein, 15 aa, Artificial Sequence
  Synthetically generated peptide
  VARIANT (1)..(15): Xaa = Any Amino Acid
ACELCANPAXCTGXC

SEQ ID NO: 8644 - protein, 16 aa, Artificial Sequence
  Synthetically generated peptide
  VARIANT (1)..(16): Xaa = Any Amino Acid
ACELCANPAXCTGXXC

SEQ ID NO: 8645 - protein, 17 aa, Artificial Sequence
  Synthetically generated peptide
  VARIANT (1)..(17): Xaa = Any Amino Acid
ACELCANPAXCTGXXXC

SEQ ID NO: 8646 - protein, 14 aa, Artificial Sequence
  Synthetically generated peptide
  VARIANT (1)..(14): Xaa = Any Amino Acid
ACELCANPACXTGC

SEQ ID NO: 8647 - protein, 15 aa, Artificial Sequence
  Synthetically generated peptide
  VARIANT (1)..(15): Xaa = Any Amino Acid
ACELCANPACXXTGC

SEQ ID NO: 8648 - protein, 16 aa, Artificial Sequence
  Synthetically generated peptide
  VARIANT (1)..(16): Xaa = Any Amino Acid
ACELCANPACXXXTGC

SEQ ID NO: 8649 - protein, 17 aa, Artificial Sequence
  Synthetically generated peptide
  VARIANT (1)..(17): Xaa = Any Amino Acid
ACELCANPACXXXXTGC

SEQ ID NO: 8650 - protein, 17 aa, Artificial Sequence
  Synthetically generated peptide
  VARIANT (1)..(17): Xaa = Any Amino Acid
ACELCANPACXXXTXGC

SEQ ID NO: 8651 - protein, 17 aa, Artificial Sequence
  Synthetically generated peptide
  VARIANT (1)..(17): Xaa = Any Amino Acid
ACELCANPACXXXTGXC

SEQ ID NO: 8652 - protein, 16 aa, Artificial Sequence
  Synthetically generated peptide
  VARIANT (1)..(16): Xaa = Any Amino Acid
ACELCANPACXXTXGC

SEQ ID NO: 8653 - protein, 17 aa, Artificial Sequence
  Synthetically generated peptide
  VARIANT (1)..(17): Xaa = Any Amino Acid
ACELCANPACXXTXXGC

SEQ ID NO: 8654 - protein, 17 aa, Artificial Sequence
  Synthetically generated peptide
  VARIANT (1)..(17): Xaa = Any Amino Acid
ACELCANPACXXTXGXC

SEQ ID NO: 8655 - protein, 16 aa, Artificial Sequence
  Synthetically generated peptide
  VARIANT (1)..(16): Xaa = Any Amino Acid
ACELCANPACXXTGXC

SEQ ID NO: 8656 - protein, 17 aa, Artificial Sequence
  Synthetically generated peptide
  VARIANT (1)..(17): Xaa = Any Amino Acid
ACELCANPACXXTGXXC

SEQ ID NO: 8657 - protein, 15 aa, Artificial Sequence
  Synthetically generated peptide
  VARIANT (1)..(15): Xaa = Any Amino Acid
ACELCANPACXTXGC

SEQ ID NO: 8658 - protein, 16 aa, Artificial Sequence
  Synthetically generated peptide
  VARIANT (1)..(16): Xaa = Any Amino Acid
ACELCANPACXTXXGC

SEQ ID NO: 8659 - protein, 17 aa, Artificial Sequence
  Synthetically generated peptide
  VARIANT (1)..(17): Xaa = Any Amino Acid
ACELCANPACXTXXXGC

SEQ ID NO: 8660 - protein, 17 aa, Artificial Sequence
  Synthetically generated peptide
  VARIANT (1)..(17): Xaa = Any Amino Acid
ACELCANPACXTXXGXC

SEQ ID NO: 8661 - protein, 16 aa, Artificial Sequence
  Synthetically generated peptide
  VARIANT (1)..(16): Xaa = Any Amino Acid
ACELCANPACXTXGXC

SEQ ID NO: 8662 - protein, 17 aa, Artificial Sequence
  Synthetically generated peptide
  VARIANT (1)..(17): Xaa = Any Amino Acid
ACELCANPACXTXGXXC

SEQ ID NO: 8663 - protein, 15 aa, Artificial Sequence
  Synthetically generated peptide
  VARIANT (1)..(15): Xaa = Any Amino Acid
ACELCANPACXTGXC

SEQ ID NO: 8664 - protein, 16 aa, Artificial Sequence
  Synthetically generated peptide
  VARIANT (1)..(16): Xaa = Any Amino Acid
ACELCANPACXTGXXC

SEQ ID NO: 8665 - protein, 17 aa, Artificial Sequence
  Synthetically generated peptide
  VARIANT (1)..(17): Xaa = Any Amino Acid
ACELCANPACXTGXXXC

SEQ ID NO: 8666 - protein, 14 aa, Artificial Sequence
  Synthetically generated peptide
  VARIANT (1)..(14): Xaa = Any Amino Acid
ACELCANPACTXGC

SEQ ID NO: 8667 - protein, 15 aa, Artificial Sequence
  Synthetically generated peptide
  VARIANT (1)..(15): Xaa = Any Amino Acid
ACELCANPACTXXGC

SEQ ID NO: 8668 - protein, 16 aa, Artificial Sequence
  Synthetically generated peptide
  VARIANT (1)..(16): Xaa = Any Amino Acid
ACELCANPACTXXXGC

SEQ ID NO: 8669 - protein, 17 aa, Artificial Sequence
  Synthetically generated peptide
  VARIANT (1)..(17): Xaa = Any Amino Acid
ACELCANPACTXXXXGC

SEQ ID NO: 8670 - protein, 17 aa, Artificial Sequence
  Synthetically generated peptide
  VARIANT (1)..(17): Xaa = Any Amino Acid
ACELCANPACTXXXGXC

SEQ ID NO: 8671 - protein, 16 aa, Artificial Sequence
  Synthetically generated peptide
  VARIANT (1)..(16): Xaa = Any Amino Acid
ACELCANPACTXXGXC

SEQ ID NO: 8672 - protein, 17 aa, Artificial Sequence
  Synthetically generated peptide
  VARIANT (1)..(17): Xaa = Any Amino Acid
ACELCANPACTXXGXXC

SEQ ID NO: 8673 - protein, 15 aa, Artificial Sequence
  Synthetically generated peptide
  VARIANT (1)..(15): Xaa = Any Amino Acid
ACELCANPACTXGXC

SEQ ID NO: 8674 - protein, 16 aa, Artificial Sequence
  Synthetically generated peptide
  VARIANT (1)..(16): Xaa = Any Amino Acid
ACELCANPACTXGXXC

SEQ ID NO: 8675 - protein, 17 aa, Artificial Sequence
  Synthetically generated peptide
  VARIANT (1)..(17): Xaa = Any Amino Acid
ACELCANPACTXGXXXC

SEQ ID NO: 8676 - protein, 14 aa, Artificial Sequence
  Synthetically generated peptide
  VARIANT (1)..(14): Xaa = Any Amino Acid
ACELCANPACTGXC

SEQ ID NO: 8677 - protein, 15 aa, Artificial Sequence
  Synthetically generated peptide
  VARIANT (1)..(15): Xaa = Any Amino Acid
ACELCANPACTGXXC

SEQ ID NO: 8678 - protein, 16 aa, Artificial Sequence
  Synthetically generated peptide
  VARIANT (1)..(16): Xaa = Any Amino Acid
ACELCANPACTGXXXC

SEQ ID NO: 8679 - protein, 17 aa, Artificial Sequence
  Synthetically generated peptide
  VARIANT (1)..(17): Xaa = Any Amino Acid
ACELCANPACTGXXXXC

SEQ ID NO: 8680 - protein, 14 aa, Artificial Sequence
  Synthetically generated peptide
  VARIANT (1)..(14): Xaa = Any Amino Acid
CCXELACNPACTGA

SEQ ID NO: 8681 - protein, 15 aa, Artificial Sequence
  Synthetically generated peptide
  VARIANT (1)..(15): Xaa = Any Amino Acid
CCXXELACNPACTGA

SEQ ID NO: 8682 - protein, 16 aa, Artificial Sequence
  Synthetically generated peptide
  VARIANT (1)..(16): Xaa = Any Amino Acid
CCXXXELACNPACTGA

SEQ ID NO: 8683 - protein, 17 aa, Artificial Sequence
  Synthetically generated peptide
  VARIANT (1)..(17): Xaa = Any Amino Acid
CCXXXXELACNPACTGA

SEQ ID NO: 8684 - protein, 17 aa, Artificial Sequence
  Synthetically generated peptide
  VARIANT (1)..(17): Xaa = Any Amino Acid
CCXXXEXLACNPACTGA

SEQ ID NO: 8685 - protein, 17 aa, Artificial Sequence
  Synthetically generated peptide
  VARIANT (1)..(17): Xaa = Any Amino Acid
CCXXXELXACNPACTGA

SEQ ID NO: 8686 - protein, 17 aa, Artificial Sequence
  Synthetically generated peptide
  VARIANT (1)..(17): Xaa = Any Amino Acid
CCXXXELACXNPACTGA

SEQ ID NO: 8687 - protein, 17 aa, Artificial Sequence
  Synthetically generated peptide
  VARIANT (1)..(17): Xaa = Any Amino Acid
CCXXXELACNXPACTGA

SEQ ID NO: 8688 - protein, 17 aa, Artificial Sequence
  Synthetically generated peptide
  VARIANT (1)..(17): Xaa = Any Amino Acid
CCXXXELACNPXACTGA

SEQ ID NO: 8689 - protein, 17 aa, Artificial Sequence
  Synthetically generated peptide
  VARIANT (1)..(17): Xaa = Any Amino Acid
CCXXXELACNPAXCTGA

SEQ ID NO: 8690 - protein, 17 aa, Artificial Sequence
  Synthetically generated peptide
  VARIANT (1)..(17): Xaa = Any Amino Acid
CCXXXELACNPACXTGA

SEQ ID NO: 8691 - protein, 17 aa, Artificial Sequence
  Synthetically generated peptide
  VARIANT (1)..(17): Xaa = Any Amino Acid
CCXXXELACNPACTXGA

SEQ ID NO: 8692 - protein, 17 aa, Artificial Sequence
  Synthetically generated peptide
  VARIANT (1)..(17): Xaa = Any Amino Acid
CCXXXELACNPACTGXA

SEQ ID NO: 8693 - protein, 16 aa, Artificial Sequence
  Synthetically generated peptide
  VARIANT (1)..(16): Xaa = Any Amino Acid
CCXXEXLACNPACTGA

SEQ ID NO: 8694 - protein, 17 aa, Artificial Sequence
  Synthetically generated peptide
  VARIANT (1)..(17): Xaa = Any Amino Acid
CCXXEXXLACNPACTGA

SEQ ID NO: 8695 - protein, 17 aa, Artificial Sequence
  Synthetically generated peptide
  VARIANT (1)..(17): Xaa = Any Amino Acid
CCXXEXLXACNPACTGA

SEQ ID NO: 8696 - protein, 17 aa, Artificial Sequence
  Synthetically generated peptide
  VARIANT (1)..(17): Xaa = Any Amino Acid
CCXXEXLACXNPACTGA

SEQ ID NO: 8697 - protein, 17 aa, Artificial Sequence
  Synthetically generated peptide
  VARIANT (1)..(17): Xaa = Any Amino Acid
CCXXEXLACNXPACTGA

SEQ ID NO: 8698 - protein, 17 aa, Artificial Sequence
  Synthetically generated peptide
  VARIANT (1)..(17): Xaa = Any Amino Acid
CCXXEXLACNPXACTGA

SEQ ID NO: 8699 - protein, 17 aa, Artificial Sequence
  Synthetically generated peptide
  VARIANT (1)..(17): Xaa = Any Amino Acid
CCXXEXLACNPAXCTGA

SEQ ID NO: 8700 - protein, 17 aa, Artificial Sequence
  Synthetically generated peptide
  VARIANT (1)..(17): Xaa = Any Amino Acid
CCXXEXLACNPACXTGA

SEQ ID NO: 8701 - protein, 17 aa, Artificial Sequence
  Synthetically generated peptide
  VARIANT (1)..(17): Xaa = Any Amino Acid
CCXXEXLACNPACTXGA

SEQ ID NO: 8702 - protein, 17 aa, Artificial Sequence
  Synthetically generated peptide
  VARIANT (1)..(17): Xaa = Any Amino Acid
CCXXEXLACNPACTGXA

SEQ ID NO: 8703 - protein, 16 aa, Artificial Sequence
  Synthetically generated peptide
  VARIANT (1)..(16): Xaa = Any Amino Acid
CCXXELXACNPACTGA

SEQ ID NO: 8704 - protein, 17 aa, Artificial Sequence
  Synthetically generated peptide
  VARIANT (1)..(17): Xaa = Any Amino Acid
CCXXELXXACNPACTGA

SEQ ID NO: 8705 - protein, 17 aa, Artificial Sequence
  Synthetically generated peptide
  VARIANT (1)..(17): Xaa = Any Amino Acid
CCXXELXACXNPACTGA

SEQ ID NO: 8706 - protein, 17 aa, Artificial Sequence
  Synthetically generated peptide
  VARIANT (1)..(17): Xaa = Any Amino Acid
CCXXELXACNXPACTGA

SEQ ID NO: 8707 - protein, 17 aa, Artificial Sequence
  Synthetically generated peptide
  VARIANT (1)..(17): Xaa = Any Amino Acid
CCXXELXACNPXACTGA

SEQ ID NO: 8708 - protein, 17 aa, Artificial Sequence
  Synthetically generated peptide
  VARIANT (1)..(17): Xaa = Any Amino Acid
CCXXELXACNPAXCTGA

SEQ ID NO: 8709 - protein, 17 aa, Artificial Sequence
  Synthetically generated peptide
  VARIANT (1)..(17): Xaa = Any Amino Acid
CCXXELXACNPACXTGA

SEQ ID NO: 8710 - protein, 17 aa, Artificial Sequence
  Synthetically generated peptide
  VARIANT (1)..(17): Xaa = Any Amino Acid
CCXXELXACNPACTXGA

SEQ ID NO: 8711 - protein, 17 aa, Artificial Sequence
  Synthetically generated peptide
  VARIANT (1)..(17): Xaa = Any Amino Acid
CCXXELXACNPACTGXA

SEQ ID NO: 8712 - protein, 16 aa, Artificial Sequence
  Synthetically generated peptide
  VARIANT (1)..(16): Xaa = Any Amino Acid
CCXXELACXNPACTGA

SEQ ID NO: 8713 - protein, 17 aa, Artificial Sequence
  Synthetically generated peptide
  VARIANT (1)..(17): Xaa = Any Amino Acid
CCXXELACXXNPACTGA

SEQ ID NO: 8714 - protein, 17 aa, Artificial Sequence
  Synthetically generated peptide
  VARIANT (1)..(17): Xaa = Any Amino Acid
CCXXELACXNXPACTGA

SEQ ID NO: 8715 - protein, 17 aa, Artificial Sequence
  Synthetically generated peptide
  VARIANT (1)..(17): Xaa = Any Amino Acid
CCXXELACXNPXACTGA

SEQ ID NO: 8716 - protein, 17 aa, Artificial Sequence
  Synthetically generated peptide
  VARIANT (1)..(17): Xaa = Any Amino Acid
CCXXELACXNPAXCTGA

SEQ ID NO: 8717 - protein, 17 aa, Artificial Sequence
  Synthetically generated peptide
  VARIANT (1)..(17): Xaa = Any Amino Acid
CCXXELACXNPACXTGA

SEQ ID NO: 8718 - protein, 17 aa, Artificial Sequence
  Synthetically generated peptide
  VARIANT (1)..(17): Xaa = Any Amino Acid
CCXXELACXNPACTXGA

SEQ ID NO: 8719 - protein, 17 aa, Artificial Sequence
  Synthetically generated peptide
  VARIANT (1)..(17): Xaa = Any Amino Acid
CCXXELACXNPACTGXA

SEQ ID NO: 8720 - protein, 16 aa, Artificial Sequence
  Synthetically generated peptide
  VARIANT (1)..(16): Xaa = Any Amino Acid
CCXXELACNXPACTGA

SEQ ID NO: 8721 - protein, 17 aa, Artificial Sequence
  Synthetically generated peptide
  VARIANT (1)..(17): Xaa = Any Amino Acid
CCXXELACNXXPACTGA

SEQ ID NO: 8722 - protein, 17 aa, Artificial Sequence
  Synthetically generated peptide
  VARIANT (1)..(17): Xaa = Any Amino Acid
CCXXELACNXPXACTGA

SEQ ID NO: 8723 - protein, 17 aa, Artificial Sequence
  Synthetically generated peptide
  VARIANT (1)..(17): Xaa = Any Amino Acid
CCXXELACNXPAXCTGA

SEQ ID NO: 8724 - protein, 17 aa, Artificial Sequence
  Synthetically generated peptide
  VARIANT (1)..(17): Xaa = Any Amino Acid
CCXXELACNXPACXTGA

SEQ ID NO: 8725 - protein, 17 aa, Artificial Sequence
  Synthetically generated peptide
  VARIANT (1)..(17): Xaa = Any Amino Acid
CCXXELACNXPACTXGA

SEQ ID NO: 8726 - protein, 17 aa, Artificial Sequence
  Synthetically generated peptide
  VARIANT (1)..(17): Xaa = Any Amino Acid
CCXXELACNXPACTGXA

SEQ ID NO: 8727 - protein, 16 aa, Artificial Sequence
  Synthetically generated peptide
  VARIANT (1)..(16): Xaa = Any Amino Acid
CCXXELACNPXACTGA

SEQ ID NO: 8728 - protein, 17 aa, Artificial Sequence
  Synthetically generated peptide
  VARIANT (1)..(17): Xaa = Any Amino Acid
CCXXELACNPXXACTGA

SEQ ID NO: 8729 - protein, 17 aa, Artificial Sequence
  Synthetically generated peptide
  VARIANT (1)..(17): Xaa = Any Amino Acid
CCXXELACNPXAXCTGA

SEQ ID NO: 8730 - protein, 17 aa, Artificial Sequence
  Synthetically generated peptide
  VARIANT (1)..(17): Xaa = Any Amino Acid
CCXXELACNPXACXTGA

SEQ ID NO: 8731 - protein, 17 aa, Artificial Sequence
  Synthetically generated peptide
  VARIANT (1)..(17): Xaa = Any Amino Acid
CCXXELACNPXACTXGA

SEQ ID NO: 8732 - protein, 17 aa, Artificial Sequence
  Synthetically generated peptide
  VARIANT (1)..(17): Xaa = Any Amino Acid
CCXXELACNPXACTGXA

SEQ ID NO: 8733 - protein, 16 aa, Artificial Sequence
  Synthetically generated peptide
  VARIANT (1)..(16): Xaa = Any Amino Acid
CCXXELACNPAXCTGA

SEQ ID NO: 8734 - protein, 17 aa, Artificial Sequence
  Synthetically generated peptide
  VARIANT (1)..(17): Xaa = Any Amino Acid
CCXXELACNPAXXCTGA

SEQ ID NO: 8735 - protein, 17 aa, Artificial Sequence
  Synthetically generated peptide
  VARIANT (1)..(17): Xaa = Any Amino Acid
CCXXELACNPAXCXTGA

SEQ ID NO: 8736 - protein, 17 aa, Artificial Sequence
  Synthetically generated peptide
  VARIANT (1)..(17): Xaa = Any Amino Acid
CCXXELACNPAXCTXGA

SEQ ID NO: 8737 - protein, 17 aa, Artificial Sequence
  Synthetically generated peptide
  VARIANT (1)..(17): Xaa = Any Amino Acid
CCXXELACNPAXCTGXA

SEQ ID NO: 8738 - protein, 16 aa, Artificial Sequence
  Synthetically generated peptide
  VARIANT (1)..(16): Xaa = Any Amino Acid
CCXXELACNPACXTGA

SEQ ID NO: 8739 - protein, 17 aa, Artificial Sequence
  Synthetically generated peptide
  VARIANT (1)..(17): Xaa = Any Amino Acid
CCXXELACNPACXXTGA

SEQ ID NO: 8740 - protein, 17 aa, Artificial Sequence
  Synthetically generated peptide
  VARIANT (1)..(17): Xaa = Any Amino Acid
CCXXELACNPACXTXGA

SEQ ID NO: 8741 - protein, 17 aa, Artificial Sequence
  Synthetically generated peptide
  VARIANT (1)..(17): Xaa = Any Amino Acid
CCXXELACNPACXTGXA

SEQ ID NO: 8742 - protein, 16 aa, Artificial Sequence
  Synthetically generated peptide
  VARIANT (1)..(16): Xaa = Any Amino Acid
CCXXELACNPACTXGA

SEQ ID NO: 8743 - protein, 17 aa, Artificial Sequence
  Synthetically generated peptide
  VARIANT (1)..(17): Xaa = Any Amino Acid
CCXXELACNPACTXXGA

SEQ ID NO: 8744 - protein, 17 aa, Artificial Sequence
  Synthetically generated peptide
  VARIANT (1)..(17): Xaa = Any Amino Acid
CCXXELACNPACTXGXA

SEQ ID NO: 8745 - protein, 16 aa, Artificial Sequence
  Synthetically generated peptide
  VARIANT (1)..(16): Xaa = Any Amino Acid
CCXXELACNPACTGXA

SEQ ID NO: 8746 - protein, 17 aa, Artificial Sequence
  Synthetically generated peptide
  VARIANT (1)..(17): Xaa = Any Amino Acid
CCXXELACNPACTGXXA

SEQ ID NO: 8747 - protein, 15 aa, Artificial Sequence
  Synthetically generated peptide
  VARIANT (1)..(15): Xaa = Any Amino Acid
CCXEXLACNPACTGA

SEQ ID NO: 8748 - protein, 16 aa, Artificial Sequence
  Synthetically generated peptide
  VARIANT (1)..(16): Xaa = Any Amino Acid
CCXEXXLACNPACTGA

SEQ ID NO: 8749 - protein, 17 aa, Artificial Sequence
  Synthetically generated peptide
  VARIANT (1)..(17): Xaa = Any Amino Acid
CCXEXXXLACNPACTGA

SEQ ID NO: 8750 - protein, 17 aa, Artificial Sequence
  Synthetically generated peptide
  VARIANT (1)..(17): Xaa = Any Amino Acid
CCXEXXLXACNPACTGA

SEQ ID NO: 8751 - protein, 17 aa, Artificial Sequence
  Synthetically generated peptide
  VARIANT (1)..(17): Xaa = Any Amino Acid
CCXEXXLACXNPACTGA

SEQ ID NO: 8752 - protein, 17 aa, Artificial Sequence
  Synthetically generated peptide
  VARIANT (1)..(17): Xaa = Any Amino Acid
CCXEXXLACNXPACTGA

SEQ ID NO: 8753 - protein, 17 aa, Artificial Sequence
  Synthetically generated peptide
  VARIANT (1)..(17): Xaa = Any Amino Acid
CCXEXXLACNPXACTGA

SEQ ID NO: 8754 - protein, 17 aa, Artificial Sequence
  Synthetically generated peptide
  VARIANT (1)..(17): Xaa = Any Amino Acid
CCXEXXLACNPAXCTGA

SEQ ID NO: 8755 - protein, 17 aa, Artificial Sequence
  Synthetically generated peptide
  VARIANT (1)..(17): Xaa = Any Amino Acid
CCXEXXLACNPACXTGA

SEQ ID NO: 8756 - protein, 17 aa, Artificial Sequence
  Synthetically generated peptide
  VARIANT (1)..(17): Xaa = Any Amino Acid
CCXEXXLACNPACTXGA

SEQ ID NO: 8757 - protein, 17 aa, Artificial Sequence
  Synthetically generated peptide
  VARIANT (1)..(17): Xaa = Any Amino Acid
CCXEXXLACNPACTGXA

SEQ ID NO: 8758 - protein, 16 aa, Artificial Sequence
  Synthetically generated peptide
  VARIANT (1)..(16): Xaa = Any Amino Acid
CCXEXLXACNPACTGA

SEQ ID NO: 8759 - protein, 17 aa, Artificial Sequence
  Synthetically generated peptide
  VARIANT (1)..(17): Xaa = Any Amino Acid
CCXEXLXXACNPACTGA

SEQ ID NO: 8760 - protein, 17 aa, Artificial Sequence
  Synthetically generated peptide
  VARIANT (1)..(17): Xaa = Any Amino Acid
CCXEXLXACXNPACTGA

SEQ ID NO: 8761 - protein, 17 aa, Artificial Sequence
  Synthetically generated peptide
  VARIANT (1)..(17): Xaa = Any Amino Acid
CCXEXLXACNXPACTGA

SEQ ID NO: 8762 - protein, 17 aa, Artificial Sequence
  Synthetically generated peptide
  VARIANT (1)..(17): Xaa = Any Amino Acid
CCXEXLXACNPXACTGA

SEQ ID NO: 8763 - protein, 17 aa, Artificial Sequence
  Synthetically generated peptide
  VARIANT (1)..(17): Xaa = Any Amino Acid
CCXEXLXACNPAXCTGA

SEQ ID NO: 8764 - protein, 17 aa, Artificial Sequence
  Synthetically generated peptide
  VARIANT (1)..(17): Xaa = Any Amino Acid
CCXEXLXACNPACXTGA

SEQ ID NO: 8765 - protein, 17 aa, Artificial Sequence
  Synthetically generated peptide
  VARIANT (1)..(17): Xaa = Any Amino Acid
CCXEXLXACNPACTXGA

SEQ ID NO: 8766 - protein, 17 aa, Artificial Sequence
  Synthetically generated peptide
  VARIANT (1)..(17): Xaa = Any Amino Acid
CCXEXLXACNPACTGXA

SEQ ID NO: 8767 - protein, 16 aa, Artificial Sequence
  Synthetically generated peptide
  VARIANT (1)..(16): Xaa = Any Amino Acid
CCXEXLACXNPACTGA

SEQ ID NO: 8768 - protein, 17 aa, Artificial Sequence
  Synthetically generated peptide
  VARIANT (1)..(17): Xaa = Any Amino Acid
CCXEXLACXXNPACTGA

SEQ ID NO: 8769 - protein, 17 aa, Artificial Sequence
  Synthetically generated peptide
  VARIANT (1)..(17): Xaa = Any Amino Acid
CCXEXLACXNXPACTGA

SEQ ID NO: 8770 - protein, 17 aa, Artificial Sequence
  Synthetically generated peptide
  VARIANT (1)..(17): Xaa = Any Amino Acid
CCXEXLACXNPXACTGA

SEQ ID NO: 8771 - protein, 17 aa, Artificial Sequence
  Synthetically generated peptide
  VARIANT (1)..(17): Xaa = Any Amino Acid
CCXEXLACXNPAXCTGA

SEQ ID NO: 8772 - protein, 17 aa, Artificial Sequence
  Synthetically generated peptide
  VARIANT (1)..(17): Xaa = Any Amino Acid
CCXEXLACXNPACXTGA

SEQ ID NO: 8773 - protein, 17 aa, Artificial Sequence
  Synthetically generated peptide
  VARIANT (1)..(17): Xaa = Any Amino Acid
CCXEXLACXNPACTXGA

SEQ ID NO: 8774 - protein, 17 aa, Artificial Sequence
  Synthetically generated peptide
  VARIANT (1)..(17): Xaa = Any Amino Acid
CCXEXLACXNPACTGXA

SEQ ID NO: 8775 - protein, 16 aa, Artificial Sequence
  Synthetically generated peptide
  VARIANT (1)..(16): Xaa = Any Amino Acid
CCXEXLACNXPACTGA

SEQ ID NO: 8776 - protein, 17 aa, Artificial Sequence
  Synthetically generated peptide
  VARIANT (1)..(17): Xaa = Any Amino Acid
CCXEXLACNXXPACTGA

SEQ ID NO: 8777 - protein, 17 aa, Artificial Sequence
  Synthetically generated peptide
  VARIANT (1)..(17): Xaa = Any Amino Acid
CCXEXLACNXPXACTGA

SEQ ID NO: 8778 - protein, 17 aa, Artificial Sequence
  Synthetically generated peptide
  VARIANT (1)..(17): Xaa = Any Amino Acid
CCXEXLACNXPAXCTGA

SEQ ID NO: 8779 - protein, 17 aa, Artificial Sequence
  Synthetically generated peptide
  VARIANT (1)..(17): Xaa = Any Amino Acid
CCXEXLACNXPACXTGA

SEQ ID NO: 8780 - protein, 17 aa, Artificial Sequence
  Synthetically generated peptide
  VARIANT (1)..(17): Xaa = Any Amino Acid
CCXEXLACNXPACTXGA

SEQ ID NO: 8781 - protein, 17 aa, Artificial Sequence
  Synthetically generated peptide
  VARIANT (1)..(17): Xaa = Any Amino Acid
CCXEXLACNXPACTGXA

SEQ ID NO: 8782 - protein, 16 aa, Artificial Sequence
  Synthetically generated peptide
  VARIANT (1)..(16): Xaa = Any Amino Acid
CCXEXLACNPXACTGA

SEQ ID NO: 8783 - protein, 17 aa, Artificial Sequence
  Synthetically generated peptide
  VARIANT (1)..(17): Xaa = Any Amino Acid
CCXEXLACNPXXACTGA

SEQ ID NO: 8784 - protein, 17 aa, Artificial Sequence
  Synthetically generated peptide
  VARIANT (1)..(17): Xaa = Any Amino Acid
CCXEXLACNPXAXCTGA

SEQ ID NO: 8785 - protein, 17 aa, Artificial Sequence
  Synthetically generated peptide
  VARIANT (1)..(17): Xaa = Any Amino Acid
CCXEXLACNPXACXTGA

SEQ ID NO: 8786 - protein, 17 aa, Artificial Sequence
  Synthetically generated peptide
  VARIANT (1)..(17): Xaa = Any Amino Acid
CCXEXLACNPXACTXGA

SEQ ID NO: 8787 - protein, 17 aa, Artificial Sequence
  Synthetically generated peptide
  VARIANT (1)..(17): Xaa = Any Amino Acid
CCXEXLACNPXACTGXA

SEQ ID NO: 8788 - protein, 16 aa, Artificial Sequence
  Synthetically generated peptide
  VARIANT (1)..(16): Xaa = Any Amino Acid
CCXEXLACNPAXCTGA

SEQ ID NO: 8789 - protein, 17 aa, Artificial Sequence
  Synthetically generated peptide
  VARIANT (1)..(17): Xaa = Any Amino Acid
CCXEXLACNPAXXCTGA

SEQ ID NO: 8790 - protein, 17 aa, Artificial Sequence
  Synthetically generated peptide
  VARIANT (1)..(17): Xaa = Any Amino Acid
CCXEXLACNPAXCXTGA

SEQ ID NO: 8791 - protein, 17 aa, Artificial Sequence
  Synthetically generated peptide
  VARIANT (1)..(17): Xaa = Any Amino Acid
CCXEXLACNPAXCTXGA

SEQ ID NO: 8792 - protein, 17 aa, Artificial Sequence
  Synthetically generated peptide
  VARIANT (1)..(17): Xaa = Any Amino Acid
CCXEXLACNPAXCTGXA

SEQ ID NO: 8793 - protein, 16 aa, Artificial Sequence
  Synthetically generated peptide
  VARIANT (1)..(16): Xaa = Any Amino Acid
CCXEXLACNPACXTGA

SEQ ID NO: 8794 - protein, 17 aa, Artificial Sequence
  Synthetically generated peptide
  VARIANT (1)..(17): Xaa = Any Amino Acid
CCXEXLACNPACXXTGA

SEQ ID NO: 8795 - protein, 17 aa, Artificial Sequence
  Synthetically generated peptide
  VARIANT (1)..(17): Xaa = Any Amino Acid
CCXEXLACNPACXTXGA

SEQ ID NO: 8796 - protein, 17 aa, Artificial Sequence
  Synthetically generated peptide
  VARIANT (1)..(17): Xaa = Any Amino Acid
CCXEXLACNPACXTGXA

SEQ ID NO: 8797 - protein, 16 aa, Artificial Sequence
  Synthetically generated peptide
  VARIANT (1)..(16): Xaa = Any Amino Acid
CCXEXLACNPACTXGA

SEQ ID NO: 8798 - protein, 17 aa, Artificial Sequence
  Synthetically generated peptide
  VARIANT (1)..(17): Xaa = Any Amino Acid
CCXEXLACNPACTXXGA

SEQ ID NO: 8799 - protein, 17 aa, Artificial Sequence
  Synthetically generated peptide
  VARIANT (1)..(17): Xaa = Any Amino Acid
CCXEXLACNPACTXGXA

SEQ ID NO: 8800 - protein, 16 aa, Artificial Sequence
  Synthetically generated peptide
  VARIANT (1)..(16): Xaa = Any Amino Acid
CCXEXLACNPACTGXA

SEQ ID NO: 8801 - protein, 17 aa, Artificial Sequence
  Synthetically generated peptide
  VARIANT (1)..(17): Xaa = Any Amino Acid
CCXEXLACNPACTGXXA

SEQ ID NO: 8802 - protein, 15 aa, Artificial Sequence
  Synthetically generated peptide
  VARIANT (1)..(15): Xaa = Any Amino Acid
CCXELXACNPACTGA

SEQ ID NO: 8803 - protein, 16 aa, Artificial Sequence
  Synthetically generated peptide
  VARIANT (1)..(16): Xaa = Any Amino Acid
CCXELXXACNPACTGA

SEQ ID NO: 8804 - protein, 17 aa, Artificial Sequence
  Synthetically generated peptide
  VARIANT (1)..(17): Xaa = Any Amino Acid
CCXELXXXACNPACTGA

SEQ ID NO: 8805 - protein, 17 aa, Artificial Sequence
  Synthetically generated peptide
  VARIANT (1)..(17): Xaa = Any Amino Acid
CCXELXXACXNPACTGA

SEQ ID NO: 8806 - protein, 17 aa, Artificial Sequence
  Synthetically generated peptide
  VARIANT (1)..(17): Xaa = Any Amino Acid
CCXELXXACNXPACTGA

SEQ ID NO: 8807 - protein, 17 aa, Artificial Sequence
  Synthetically generated peptide
  VARIANT (1)..(17): Xaa = Any Amino Acid
CCXELXXACNPXACTGA

SEQ ID NO: 8808 - protein, 17 aa, Artificial Sequence
  Synthetically generated peptide
  VARIANT (1)..(17): Xaa = Any Amino Acid
CCXELXXACNPAXCTGA

SEQ ID NO: 8809 - protein, 17 aa, Artificial Sequence
  Synthetically generated peptide
  VARIANT (1)..(17): Xaa = Any Amino Acid
CCXELXXACNPACXTGA

SEQ ID NO: 8810 - protein, 17 aa, Artificial Sequence
  Synthetically generated peptide
  VARIANT (1)..(17): Xaa = Any Amino Acid
CCXELXXACNPACTXGA

SEQ ID NO: 8811 - protein, 17 aa, Artificial Sequence
  Synthetically generated peptide
  VARIANT (1)..(17): Xaa = Any Amino Acid
CCXELXXACNPACTGXA

SEQ ID NO: 8812 - protein, 16 aa, Artificial Sequence
  Synthetically generated peptide
  VARIANT (1)..(16): Xaa = Any Amino Acid
CCXELXACXNPACTGA

SEQ ID NO: 8813 - protein, 17 aa, Artificial Sequence
  Synthetically generated peptide
  VARIANT (1)..(17): Xaa = Any Amino Acid
CCXELXACXXNPACTGA

SEQ ID NO: 8814 - protein, 17 aa, Artificial Sequence
  Synthetically generated peptide
  VARIANT (1)..(17): Xaa = Any Amino Acid
CCXELXACXNXPACTGA

SEQ ID NO: 8815 - protein, 17 aa, Artificial Sequence
  Synthetically generated peptide
  VARIANT (1)..(17): Xaa = Any Amino Acid
CCXELXACXNPXACTGA

SEQ ID NO: 8816 - protein, 17 aa, Artificial Sequence
  Synthetically generated peptide
  VARIANT (1)..(17): Xaa = Any Amino Acid
CCXELXACXNPAXCTGA

SEQ ID NO: 8817 - protein, 17 aa, Artificial Sequence
  Synthetically generated peptide
  VARIANT (1)..(17): Xaa = Any Amino Acid
CCXELXACXNPACXTGA

SEQ ID NO: 8818 - protein, 17 aa, Artificial Sequence
  Synthetically generated peptide
  VARIANT (1)..(17): Xaa = Any Amino Acid
CCXELXACXNPACTXGA

SEQ ID NO: 8819 - protein, 17 aa, Artificial Sequence
  Synthetically generated peptide
  VARIANT (1)..(17): Xaa = Any Amino Acid
CCXELXACXNPACTGXA

SEQ ID NO: 8820 - protein, 16 aa, Artificial Sequence
  Synthetically generated peptide
  VARIANT (1)..(16): Xaa = Any Amino Acid
CCXELXACNXPACTGA

SEQ ID NO: 8821 - protein, 17 aa, Artificial Sequence
  Synthetically generated peptide
  VARIANT (1)..(17): Xaa = Any Amino Acid
CCXELXACNXXPACTGA

SEQ ID NO: 8822 - protein, 17 aa, Artificial Sequence
  Synthetically generated peptide
  VARIANT (1)..(17): Xaa = Any Amino Acid
CCXELXACNXPXACTGA

SEQ ID NO: 8823 - protein, 17 aa, Artificial Sequence
  Synthetically generated peptide
  VARIANT (1)..(17): Xaa = Any Amino Acid
CCXELXACNXPAXCTGA

SEQ ID NO: 8824 - protein, 17 aa, Artificial Sequence
  Synthetically generated peptide
  VARIANT (1)..(17): Xaa = Any Amino Acid
CCXELXACNXPACXTGA

SEQ ID NO: 8825 - protein, 17 aa, Artificial Sequence
  Synthetically generated peptide
  VARIANT (1)..(17): Xaa = Any Amino Acid
CCXELXACNXPACTXGA

SEQ ID NO: 8826 - protein, 17 aa, Artificial Sequence
  Synthetically generated peptide
  VARIANT (1)..(17): Xaa = Any Amino Acid
CCXELXACNXPACTGXA

SEQ ID NO: 8827 - protein, 16 aa, Artificial Sequence
  Synthetically generated peptide
  VARIANT (1)..(16): Xaa = Any Amino Acid
CCXELXACNPXACTGA

SEQ ID NO: 8828 - protein, 17 aa, Artificial Sequence
  Synthetically generated peptide
  VARIANT (1)..(17): Xaa = Any Amino Acid
CCXELXACNPXXACTGA

SEQ ID NO: 8829 - protein, 17 aa, Artificial Sequence
  Synthetically generated peptide
  VARIANT (1)..(17): Xaa = Any Amino Acid
CCXELXACNPXAXCTGA

SEQ ID NO: 8830 - protein, 17 aa, Artificial Sequence
  Synthetically generated peptide
  VARIANT (1)..(17): Xaa = Any Amino Acid
CCXELXACNPXACXTGA

SEQ ID NO: 8831 - protein, 17 aa, Artificial Sequence
  Synthetically generated peptide
  VARIANT (1)..(17): Xaa = Any Amino Acid
CCXELXACNPXACTXGA

SEQ ID NO: 8832 - protein, 17 aa, Artificial Sequence
  Synthetically generated peptide
  VARIANT (1)..(17): Xaa = Any Amino Acid
CCXELXACNPXACTGXA

SEQ ID NO: 8833 - protein, 16 aa, Artificial Sequence
  Synthetically generated peptide
  VARIANT (1)..(16): Xaa = Any Amino Acid
CCXELXACNPAXCTGA

SEQ ID NO: 8834 - protein, 17 aa, Artificial Sequence
  Synthetically generated peptide
  VARIANT (1)..(17): Xaa = Any Amino Acid
CCXELXACNPAXXCTGA

SEQ ID NO: 8835 - protein, 17 aa, Artificial Sequence
  Synthetically generated peptide
  VARIANT (1)..(17): Xaa = Any Amino Acid
CCXELXACNPAXCXTGA

SEQ ID NO: 8836 - protein, 17 aa, Artificial Sequence
  Synthetically generated peptide
  VARIANT (1)..(17): Xaa = Any Amino Acid
CCXELXACNPAXCTXGA

SEQ ID NO: 8837 - protein, 17 aa, Artificial Sequence
  Synthetically generated peptide
  VARIANT (1)..(17): Xaa = Any Amino Acid
CCXELXACNPAXCTGXA

SEQ ID NO: 8838 - protein, 16 aa, Artificial Sequence
  Synthetically generated peptide
  VARIANT (1)..(16): Xaa = Any Amino Acid
CCXELXACNPACXTGA

SEQ ID NO: 8839 - protein, 17 aa, Artificial Sequence
  Synthetically generated peptide
  VARIANT (1)..(17): Xaa = Any Amino Acid
CCXELXACNPACXXTGA

SEQ ID NO: 8840 - protein, 17 aa, Artificial Sequence
  Synthetically generated peptide
  VARIANT (1)..(17): Xaa = Any Amino Acid
CCXELXACNPACXTXGA

SEQ ID NO: 8841 - protein, 17 aa, Artificial Sequence
  Synthetically generated peptide
  VARIANT (1)..(17): Xaa = Any Amino Acid
CCXELXACNPACXTGXA

SEQ ID NO: 8842 - protein, 16 aa, Artificial Sequence
  Synthetically generated peptide
  VARIANT (1)..(16): Xaa = Any Amino Acid
CCXELXACNPACTXGA

SEQ ID NO: 8843 - protein, 17 aa, Artificial Sequence
  Synthetically generated peptide
  VARIANT (1)..(17): Xaa = Any Amino Acid
CCXELXACNPACTXXGA

SEQ ID NO: 8844 - protein, 17 aa, Artificial Sequence
  Synthetically generated peptide
  VARIANT (1)..(17): Xaa = Any Amino Acid
CCXELXACNPACTXGXA

SEQ ID NO: 8845 - protein, 16 aa, Artificial Sequence
  Synthetically generated peptide
  VARIANT (1)..(16): Xaa = Any Amino Acid
CCXELXACNPACTGXA

SEQ ID NO: 8846 - protein, 17 aa, Artificial Sequence
  Synthetically generated peptide
  VARIANT (1)..(17): Xaa = Any Amino Acid
CCXELXACNPACTGXXA

SEQ ID NO: 8847 - protein, 15 aa, Artificial Sequence
  Synthetically generated peptide
  VARIANT (1)..(15): Xaa = Any Amino Acid
CCXELACXNPACTGA

SEQ ID NO: 8848 - protein, 16 aa, Artificial Sequence
  Synthetically generated peptide
  VARIANT (1)..(16): Xaa = Any Amino Acid
CCXELACXXNPACTGA

SEQ ID NO: 8849 - protein, 17 aa, Artificial Sequence
  Synthetically generated peptide
  VARIANT (1)..(17): Xaa = Any Amino Acid
CCXELACXXXNPACTGA

SEQ ID NO: 8850 - protein, 17 aa, Artificial Sequence
  Synthetically generated peptide
  VARIANT (1)..(17): Xaa = Any Amino Acid
CCXELACXXNXPACTGA

SEQ ID NO: 8851 - protein, 17 aa, Artificial Sequence
  Synthetically generated peptide
  VARIANT (1)..(17): Xaa = Any Amino Acid
CCXELACXXNPXACTGA

SEQ ID NO: 8852 - protein, 17 aa, Artificial Sequence
  Synthetically generated peptide
  VARIANT (1)..(17): Xaa = Any Amino Acid
CCXELACXXNPAXCTGA

SEQ ID NO: 8853 - protein, 17 aa, Artificial Sequence
  Synthetically generated peptide
  VARIANT (1)..(17): Xaa = Any Amino Acid
CCXELACXXNPACXTGA

SEQ ID NO: 8854 - protein, 17 aa, Artificial Sequence
  Synthetically generated peptide
  VARIANT (1)..(17): Xaa = Any Amino Acid
CCXELACXXNPACTXGA

SEQ ID NO: 8855 - protein, 17 aa, Artificial Sequence
  Synthetically generated peptide
  VARIANT (1)..(17): Xaa = Any Amino Acid
CCXELACXXNPACTGXA

SEQ ID NO: 8856 - protein, 16 aa, Artificial Sequence
  Synthetically generated peptide
  VARIANT (1)..(16): Xaa = Any Amino Acid
CCXELACXNXPACTGA

SEQ ID NO: 8857 - protein, 17 aa, Artificial Sequence
  Synthetically generated peptide
  VARIANT (1)..(17): Xaa = Any Amino Acid
CCXELACXNXXPACTGA

SEQ ID NO: 8858 - protein, 17 aa, Artificial Sequence
  Synthetically generated peptide
  VARIANT (1)..(17): Xaa = Any Amino Acid
CCXELACXNXPXACTGA

SEQ ID NO: 8859 - protein, 17 aa, Artificial Sequence
  Synthetically generated peptide
  VARIANT (1)..(17): Xaa = Any Amino Acid
CCXELACXNXPAXCTGA

SEQ ID NO: 8860 - protein, 17 aa, Artificial Sequence
  Synthetically generated peptide
  VARIANT (1)..(17): Xaa = Any Amino Acid
CCXELACXNXPACXTGA

SEQ ID NO: 8861 - protein, 17 aa, Artificial Sequence
  Synthetically generated peptide
  VARIANT (1)..(17): Xaa = Any Amino Acid
CCXELACXNXPACTXGA

SEQ ID NO: 8862 - protein, 17 aa, Artificial Sequence
  Synthetically generated peptide
  VARIANT (1)..(17): Xaa = Any Amino Acid
CCXELACXNXPACTGXA

SEQ ID NO: 8863 - protein, 16 aa, Artificial Sequence
  Synthetically generated peptide
  VARIANT (1)..(16): Xaa = Any Amino Acid
CCXELACXNPXACTGA

SEQ ID NO: 8864 - protein, 17 aa, Artificial Sequence
  Synthetically generated peptide
  VARIANT (1)..(17): Xaa = Any Amino Acid
CCXELACXNPXXACTGA

SEQ ID NO: 8865 - protein, 17 aa, Artificial Sequence
  Synthetically generated peptide
  VARIANT (1)..(17): Xaa = Any Amino Acid
CCXELACXNPXAXCTGA

SEQ ID NO: 8866 - protein, 17 aa, Artificial Sequence
  Synthetically generated peptide
  VARIANT (1)..(17): Xaa = Any Amino Acid
CCXELACXNPXACXTGA

SEQ ID NO: 8867 - protein, 17 aa, Artificial Sequence
  Synthetically generated peptide
  VARIANT (1)..(17): Xaa = Any Amino Acid
CCXELACXNPXACTXGA

SEQ ID NO: 8868 - protein, 17 aa, Artificial Sequence
  Synthetically generated peptide
  VARIANT (1)..(17): Xaa = Any Amino Acid
CCXELACXNPXACTGXA

SEQ ID NO: 8869 - protein, 16 aa, Artificial Sequence
  Synthetically generated peptide
  VARIANT (1)..(16): Xaa = Any Amino Acid
CCXELACXNPAXCTGA

SEQ ID NO: 8870 - protein, 17 aa, Artificial Sequence
  Synthetically generated peptide
  VARIANT (1)..(17): Xaa = Any Amino Acid
CCXELACXNPAXXCTGA

SEQ ID NO: 8871 - protein, 17 aa, Artificial Sequence
  Synthetically generated peptide
  VARIANT (1)..(17): Xaa = Any Amino Acid
CCXELACXNPAXCXTGA

SEQ ID NO: 8872 - protein, 17 aa, Artificial Sequence
  Synthetically generated peptide
  VARIANT (1)..(17): Xaa = Any Amino Acid
CCXELACXNPAXCTXGA

SEQ ID NO: 8873 - protein, 17 aa, Artificial Sequence
  Synthetically generated peptide
  VARIANT (1)..(17): Xaa = Any Amino Acid
CCXELACXNPAXCTGXA

SEQ ID NO: 8874 - protein, 16 aa, Artificial Sequence
  Synthetically generated peptide
  VARIANT (1)..(16): Xaa = Any Amino Acid
CCXELACXNPACXTGA

SEQ ID NO: 8875 - protein, 17 aa, Artificial Sequence
  Synthetically generated peptide
  VARIANT (1)..(17): Xaa = Any Amino Acid
CCXELACXNPACXXTGA

SEQ ID NO: 8876 - protein, 17 aa, Artificial Sequence
  Synthetically generated peptide
  VARIANT (1)..(17): Xaa = Any Amino Acid
CCXELACXNPACXTXGA

SEQ ID NO: 8877 - protein, 17 aa, Artificial Sequence
  Synthetically generated peptide
  VARIANT (1)..(17): Xaa = Any Amino Acid
CCXELACXNPACXTGXA

SEQ ID NO: 8878 - protein, 16 aa, Artificial Sequence
  Synthetically generated peptide
  VARIANT (1)..(16): Xaa = Any Amino Acid
CCXELACXNPACTXGA

SEQ ID NO: 8879 - protein, 17 aa, Artificial Sequence
  Synthetically generated peptide
  VARIANT (1)..(17): Xaa = Any Amino Acid
CCXELACXNPACTXXGA

SEQ ID NO: 8880 - protein, 17 aa, Artificial Sequence
  Synthetically generated peptide
  VARIANT (1)..(17): Xaa = Any Amino Acid
CCXELACXNPACTXGXA

SEQ ID NO: 8881 - protein, 16 aa, Artificial Sequence
  Synthetically generated peptide
  VARIANT (1)..(16): Xaa = Any Amino Acid
CCXELACXNPACTGXA

SEQ ID NO: 8882 - protein, 17 aa, Artificial Sequence
  Synthetically generated peptide
  VARIANT (1)..(17): Xaa = Any Amino Acid
CCXELACXNPACTGXXA

SEQ ID NO: 8883 - protein, 15 aa, Artificial Sequence
  Synthetically generated peptide
  VARIANT (1)..(15): Xaa = Any Amino Acid
CCXELACNXPACTGA

SEQ ID NO: 8884 - protein, 16 aa, Artificial Sequence
  Synthetically generated peptide
  VARIANT (1)..(16): Xaa = Any Amino Acid
CCXELACNXXPACTGA

SEQ ID NO: 8885 - protein, 17 aa, Artificial Sequence
  Synthetically generated peptide
  VARIANT (1)..(17): Xaa = Any Amino Acid
CCXELACNXXXPACTGA

SEQ ID NO: 8886 - protein, 17 aa, Artificial Sequence
  Synthetically generated peptide
  VARIANT (1)..(17): Xaa = Any Amino Acid
CCXELACNXXPXACTGA

SEQ ID NO: 8887 - protein, 17 aa, Artificial Sequence
  Synthetically generated peptide
  VARIANT (1)..(17): Xaa = Any Amino Acid
CCXELACNXXPAXCTGA

SEQ ID NO: 8888 - protein, 17 aa, Artificial Sequence
  Synthetically generated peptide
  VARIANT (1)..(17): Xaa = Any Amino Acid
CCXELACNXXPACXTGA

SEQ ID NO: 8889 - protein, 17 aa, Artificial Sequence
  Synthetically generated peptide
  VARIANT (1)..(17): Xaa = Any Amino Acid
CCXELACNXXPACTXGA

SEQ ID NO: 8890 - protein, 17 aa, Artificial Sequence
  Synthetically generated peptide
  VARIANT (1)..(17): Xaa = Any Amino Acid
CCXELACNXXPACTGXA

SEQ ID NO: 8891 - protein, 16 aa, Artificial Sequence
  Synthetically generated peptide
  VARIANT (1)..(16): Xaa = Any Amino Acid
CCXELACNXPXACTGA

SEQ ID NO: 8892 - protein, 17 aa, Artificial Sequence
  Synthetically generated peptide
  VARIANT (1)..(17): Xaa = Any Amino Acid
CCXELACNXPXXACTGA

SEQ ID NO: 8893 - protein, 17 aa, Artificial Sequence
  Synthetically generated peptide
  VARIANT (1)..(17): Xaa = Any Amino Acid
CCXELACNXPXAXCTGA

SEQ ID NO: 8894 - protein, 17 aa, Artificial Sequence
  Synthetically generated peptide
  VARIANT (1)..(17): Xaa = Any Amino Acid
CCXELACNXPXACXTGA

SEQ ID NO: 8895 - protein, 17 aa, Artificial Sequence
  Synthetically generated peptide
  VARIANT (1)..(17): Xaa = Any Amino Acid
CCXELACNXPXACTXGA

SEQ ID NO: 8896 - protein, 17 aa, Artificial Sequence
  Synthetically generated peptide
  VARIANT (1)..(17): Xaa = Any Amino Acid
CCXELACNXPXACTGXA

SEQ ID NO: 8897 - protein, 16 aa, Artificial Sequence
  Synthetically generated peptide
  VARIANT (1)..(16): Xaa = Any Amino Acid
CCXELACNXPAXCTGA

SEQ ID NO: 8898 - protein, 17 aa, Artificial Sequence
  Synthetically generated peptide
  VARIANT (1)..(17): Xaa = Any Amino Acid
CCXELACNXPAXXCTGA

SEQ ID NO: 8899 - protein, 17 aa, Artificial Sequence
  Synthetically generated peptide
  VARIANT (1)..(17): Xaa = Any Amino Acid
CCXELACNXPAXCXTGA

SEQ ID NO: 8900 - protein, 17 aa, Artificial Sequence
  Synthetically generated peptide
  VARIANT (1)..(17): Xaa = Any Amino Acid
CCXELACNXPAXCTXGA

SEQ ID NO: 8901 - protein, 17 aa, Artificial Sequence
  Synthetically generated peptide
  VARIANT (1)..(17): Xaa = Any Amino Acid
CCXELACNXPAXCTGXA

SEQ ID NO: 8902 - protein, 16 aa, Artificial Sequence
  Synthetically generated peptide
  VARIANT (1)..(16): Xaa = Any Amino Acid
CCXELACNXPACXTGA

SEQ ID NO: 8903 - protein, 17 aa, Artificial Sequence
  Synthetically generated peptide
  VARIANT (1)..(17): Xaa = Any Amino Acid
CCXELACNXPACXXTGA

SEQ ID NO: 8904 - protein, 17 aa, Artificial Sequence
  Synthetically generated peptide
  VARIANT (1)..(17): Xaa = Any Amino Acid
CCXELACNXPACXTXGA

SEQ ID NO: 8905 - protein, 17 aa, Artificial Sequence
  Synthetically generated peptide
  VARIANT (1)..(17): Xaa = Any Amino Acid
CCXELACNXPACXTGXA

SEQ ID NO: 8906 - protein, 16 aa, Artificial Sequence
  Synthetically generated peptide
  VARIANT (1)..(16): Xaa = Any Amino Acid
CCXELACNXPACTXGA

SEQ ID NO: 8907 - protein, 17 aa, Artificial Sequence
  Synthetically generated peptide
  VARIANT (1)..(17): Xaa = Any Amino Acid
CCXELACNXPACTXXGA

SEQ ID NO: 8908 - protein, 17 aa, Artificial Sequence
  Synthetically generated peptide
  VARIANT (1)..(17): Xaa = Any Amino Acid
CCXELACNXPACTXGXA

SEQ ID NO: 8909 - protein, 16 aa, Artificial Sequence
  Synthetically generated peptide
  VARIANT (1)..(16): Xaa = Any Amino Acid
CCXELACNXPACTGXA

SEQ ID NO: 8910 - protein, 17 aa, Artificial Sequence
  Synthetically generated peptide
  VARIANT (1)..(17): Xaa = Any Amino Acid
CCXELACNXPACTGXXA

SEQ ID NO: 8911 - protein, 15 aa, Artificial Sequence
  Synthetically generated peptide
  VARIANT (1)..(15): Xaa = Any Amino Acid
CCXELACNPXACTGA

SEQ ID NO: 8912 - protein, 16 aa, Artificial Sequence
  Synthetically generated peptide
  VARIANT (1)..(16): Xaa = Any Amino Acid
CCXELACNPXXACTGA

SEQ ID NO: 8913 - protein, 17 aa, Artificial Sequence
  Synthetically generated peptide
  VARIANT (1)..(17): Xaa = Any Amino Acid
CCXELACNPXXXACTGA

SEQ ID NO: 8914 - protein, 17 aa, Artificial Sequence
  Synthetically generated peptide
  VARIANT (1)..(17): Xaa = Any Amino Acid
CCXELACNPXXAXCTGA

SEQ ID NO: 8915 - protein, 17 aa, Artificial Sequence
  Synthetically generated peptide
  VARIANT (1)..(17): Xaa = Any Amino Acid
CCXELACNPXXACXTGA

SEQ ID NO: 8916 - protein, 17 aa, Artificial Sequence
  Synthetically generated peptide
  VARIANT (1)..(17): Xaa = Any Amino Acid
CCXELACNPXXACTXGA

SEQ ID NO: 8917 - protein, 17 aa, Artificial Sequence
  Synthetically generated peptide
  VARIANT (1)..(17): Xaa = Any Amino Acid
CCXELACNPXXACTGXA

SEQ ID NO: 8918 - protein, 16 aa, Artificial Sequence
  Synthetically generated peptide
  VARIANT (1)..(16): Xaa = Any Amino Acid
CCXELACNPXAXCTGA

SEQ ID NO: 8919 - protein, 17 aa, Artificial Sequence
  Synthetically generated peptide
  VARIANT (1)..(17): Xaa = Any Amino Acid
CCXELACNPXAXXCTGA

SEQ ID NO: 8920 - protein, 17 aa, Artificial Sequence
  Synthetically generated peptide
  VARIANT (1)..(17): Xaa = Any Amino Acid
CCXELACNPXAXCXTGA

SEQ ID NO: 8921 - protein, 17 aa, Artificial Sequence
  Synthetically generated peptide
  VARIANT (1)..(17): Xaa = Any Amino Acid
CCXELACNPXAXCTXGA

SEQ ID NO: 8922 - protein, 17 aa, Artificial Sequence
  Synthetically generated peptide
  VARIANT (1)..(17): Xaa = Any Amino Acid
CCXELACNPXAXCTGXA

SEQ ID NO: 8923 - protein, 16 aa, Artificial Sequence
  Synthetically generated peptide
  VARIANT (1)..(16): Xaa = Any Amino Acid
CCXELACNPXACXTGA

SEQ ID NO: 8924 - protein, 17 aa, Artificial Sequence
  Synthetically generated peptide
  VARIANT (1)..(17): Xaa = Any Amino Acid
CCXELACNPXACXXTGA

SEQ ID NO: 8925 - protein, 17 aa, Artificial Sequence
  Synthetically generated peptide
  VARIANT (1)..(17): Xaa = Any Amino Acid
CCXELACNPXACXTXGA

SEQ ID NO: 8926 - protein, 17 aa, Artificial Sequence
  Synthetically generated peptide
  VARIANT (1)..(17): Xaa = Any Amino Acid
CCXELACNPXACXTGXA

SEQ ID NO: 8927 - protein, 16 aa, Artificial Sequence
  Synthetically generated peptide
  VARIANT (1)..(16): Xaa = Any Amino Acid
CCXELACNPXACTXGA

SEQ ID NO: 8928 - protein, 17 aa, Artificial Sequence
  Synthetically generated peptide
  VARIANT (1)..(17): Xaa = Any Amino Acid
CCXELACNPXACTXXGA

SEQ ID NO: 8929 - protein, 17 aa, Artificial Sequence
  Synthetically generated peptide
  VARIANT (1)..(17): Xaa = Any Amino Acid
CCXELACNPXACTXGXA

SEQ ID NO: 8930 - protein, 16 aa, Artificial Sequence
  Synthetically generated peptide
  VARIANT (1)..(16): Xaa = Any Amino Acid
CCXELACNPXACTGXA

SEQ ID NO: 8931 - protein, 17 aa, Artificial Sequence
  Synthetically generated peptide
  VARIANT (1)..(17): Xaa = Any Amino Acid
CCXELACNPXACTGXXA

SEQ ID NO: 8932 - protein, 15 aa, Artificial Sequence
  Synthetically generated peptide
  VARIANT (1)..(15): Xaa = Any Amino Acid
CCXELACNPAXCTGA

SEQ ID NO: 8933 - protein, 16 aa, Artificial Sequence
  Synthetically generated peptide
  VARIANT (1)..(16): Xaa = Any Amino Acid
CCXELACNPAXXCTGA

SEQ ID NO: 8934 - protein, 17 aa, Artificial Sequence
  Synthetically generated peptide
  VARIANT (1)..(17): Xaa = Any Amino Acid
CCXELACNPAXXXCTGA

SEQ ID NO: 8935 - protein, 17 aa, Artificial Sequence
  Synthetically generated peptide
  VARIANT (1)..(17): Xaa = Any Amino Acid
CCXELACNPAXXCXTGA

SEQ ID NO: 8936 - protein, 17 aa, Artificial Sequence
  Synthetically generated peptide
  VARIANT (1)..(17): Xaa = Any Amino Acid
CCXELACNPAXXCTXGA

SEQ ID NO: 8937 - protein, 17 aa, Artificial Sequence
  Synthetically generated peptide
  VARIANT (1)..(17): Xaa = Any Amino Acid
CCXELACNPAXXCTGXA

SEQ ID NO: 8938 - protein, 16 aa, Artificial Sequence
  Synthetically generated peptide
  VARIANT (1)..(16): Xaa = Any Amino Acid
CCXELACNPAXCXTGA

SEQ ID NO: 8939 - protein, 17 aa, Artificial Sequence
  Synthetically generated peptide
  VARIANT (1)..(17): Xaa = Any Amino Acid
CCXELACNPAXCXXTGA

SEQ ID NO: 8940 - protein, 17 aa, Artificial Sequence
  Synthetically generated peptide
  VARIANT (1)..(17): Xaa = Any Amino Acid
CCXELACNPAXCXTXGA

SEQ ID NO: 8941 - protein, 17 aa, Artificial Sequence
  Synthetically generated peptide
  VARIANT (1)..(17): Xaa = Any Amino Acid
CCXELACNPAXCXTGXA

SEQ ID NO: 8942 - protein, 16 aa, Artificial Sequence
  Synthetically generated peptide
  VARIANT (1)..(16): Xaa = Any Amino Acid
CCXELACNPAXCTXGA

SEQ ID NO: 8943 - protein, 17 aa, Artificial Sequence
  Synthetically generated peptide
  VARIANT (1)..(17): Xaa = Any Amino Acid
CCXELACNPAXCTXXGA

SEQ ID NO: 8944 - protein, 17 aa, Artificial Sequence
  Synthetically generated peptide
  VARIANT (1)..(17): Xaa = Any Amino Acid
CCXELACNPAXCTXGXA

SEQ ID NO: 8945 - protein, 16 aa, Artificial Sequence
  Synthetically generated peptide
  VARIANT (1)..(16): Xaa = Any Amino Acid
CCXELACNPAXCTGXA

SEQ ID NO: 8946 - protein, 17 aa, Artificial Sequence
  Synthetically generated peptide
  VARIANT (1)..(17): Xaa = Any Amino Acid
CCXELACNPAXCTGXXA

SEQ ID NO: 8947 - protein, 15 aa, Artificial Sequence
  Synthetically generated peptide
  VARIANT (1)..(15): Xaa = Any Amino Acid
CCXELACNPACXTGA

SEQ ID NO: 8948 - protein, 16 aa, Artificial Sequence
  Synthetically generated peptide
  VARIANT (1)..(16): Xaa = Any Amino Acid
CCXELACNPACXXTGA

SEQ ID NO: 8949 - protein, 17 aa, Artificial Sequence
  Synthetically generated peptide
  VARIANT (1)..(17): Xaa = Any Amino Acid
CCXELACNPACXXXTGA

SEQ ID NO: 8950 - protein, 17 aa, Artificial Sequence
  Synthetically generated peptide
  VARIANT (1)..(17): Xaa = Any Amino Acid
CCXELACNPACXXTXGA

SEQ ID NO: 8951 - protein, 17 aa, Artificial Sequence
  Synthetically generated peptide
  VARIANT (1)..(17): Xaa = Any Amino Acid
CCXELACNPACXXTGXA

SEQ ID NO: 8952 - protein, 16 aa, Artificial Sequence
  Synthetically generated peptide
  VARIANT (1)..(16): Xaa = Any Amino Acid
CCXELACNPACXTXGA

SEQ ID NO: 8953 - protein, 17 aa, Artificial Sequence
  Synthetically generated peptide
  VARIANT (1)..(17): Xaa = Any Amino Acid
CCXELACNPACXTXXGA

SEQ ID NO: 8954 - protein, 17 aa, Artificial Sequence
  Synthetically generated peptide
  VARIANT (1)..(17): Xaa = Any Amino Acid
CCXELACNPACXTXGXA

SEQ ID NO: 8955 - protein, 16 aa, Artificial Sequence
  Synthetically generated peptide
  VARIANT (1)..(16): Xaa = Any Amino Acid
CCXELACNPACXTGXA

SEQ ID NO: 8956 - protein, 17 aa, Artificial Sequence
  Synthetically generated peptide
  VARIANT (1)..(17): Xaa = Any Amino Acid
CCXELACNPACXTGXXA

SEQ ID NO: 8957 - protein, 15 aa, Artificial Sequence
  Synthetically generated peptide
  VARIANT (1)..(15): Xaa = Any Amino Acid
CCXELACNPACTXGA

SEQ ID NO: 8958 - protein, 16 aa, Artificial Sequence
  Synthetically generated peptide
  VARIANT (1)..(16): Xaa = Any Amino Acid
CCXELACNPACTXXGA

SEQ ID NO: 8959 - protein, 17 aa, Artificial Sequence
  Synthetically generated peptide
  VARIANT (1)..(17): Xaa = Any Amino Acid
CCXELACNPACTXXXGA

SEQ ID NO: 8960 - protein, 17 aa, Artificial Sequence
  Synthetically generated peptide
  VARIANT (1)..(17): Xaa = Any Amino Acid
CCXELACNPACTXXGXA

SEQ ID NO: 8961 - protein, 16 aa, Artificial Sequence
  Synthetically generated peptide
  VARIANT (1)..(16): Xaa = Any Amino Acid
CCXELACNPACTXGXA

SEQ ID NO: 8962 - protein, 17 aa, Artificial Sequence
  Synthetically generated peptide
  VARIANT (1)..(17): Xaa = Any Amino Acid
CCXELACNPACTXGXXA

SEQ ID NO: 8963 - protein, 15 aa, Artificial Sequence
  Synthetically generated peptide
  VARIANT (1)..(15): Xaa = Any Amino Acid
CCXELACNPACTGXA

SEQ ID NO: 8964 - protein, 16 aa, Artificial Sequence
  Synthetically generated peptide
  VARIANT (1)..(16): Xaa = Any Amino Acid
CCXELACNPACTGXXA

SEQ ID NO: 8965 - protein, 17 aa, Artificial Sequence
  Synthetically generated peptide
  VARIANT (1)..(17): Xaa = Any Amino Acid
CCXELACNPACTGXXXA

SEQ ID NO: 8966 - protein, 14 aa, Artificial Sequence
  Synthetically generated peptide
  VARIANT (1)..(14): Xaa = Any Amino Acid
CCEXLACNPACTGA

SEQ ID NO: 8967 - protein, 15 aa, Artificial Sequence
  Synthetically generated peptide
  VARIANT (1)..(15): Xaa = Any Amino Acid
CCEXXLACNPACTGA

SEQ ID NO: 8968 - protein, 16 aa, Artificial Sequence
  Synthetically generated peptide
  VARIANT (1)..(16): Xaa = Any Amino Acid
CCEXXXLACNPACTGA

SEQ ID NO: 8969 - protein, 17 aa, Artificial Sequence
  Synthetically generated peptide
  VARIANT (1)..(17): Xaa = Any Amino Acid
CCEXXXXLACNPACTGA

SEQ ID NO: 8970 - protein, 17 aa, Artificial Sequence
  Synthetically generated peptide
  VARIANT (1)..(17): Xaa = Any Amino Acid
CCEXXXLXACNPACTGA

SEQ ID NO: 8971 - protein, 17 aa, Artificial Sequence
  Synthetically generated peptide
  VARIANT (1)..(17): Xaa = Any Amino Acid
CCEXXXLACXNPACTGA

SEQ ID NO: 8972 - protein, 17 aa, Artificial Sequence
  Synthetically generated peptide
  VARIANT (1)..(17): Xaa = Any Amino Acid
CCEXXXLACNXPACTGA

SEQ ID NO: 8973 - protein, 17 aa, Artificial Sequence
  Synthetically generated peptide
  VARIANT (1)..(17): Xaa = Any Amino Acid
CCEXXXLACNPXACTGA

SEQ ID NO: 8974 - protein, 17 aa, Artificial Sequence
  Synthetically generated peptide
  VARIANT (1)..(17): Xaa = Any Amino Acid
CCEXXXLACNPAXCTGA

SEQ ID NO: 8975 - protein, 17 aa, Artificial Sequence
  Synthetically generated peptide
  VARIANT (1)..(17): Xaa = Any Amino Acid
CCEXXXLACNPACXTGA

SEQ ID NO: 8976 - protein, 17 aa, Artificial Sequence
  Synthetically generated peptide
  VARIANT (1)..(17): Xaa = Any Amino Acid
CCEXXXLACNPACTXGA

SEQ ID NO: 8977 - protein, 17 aa, Artificial Sequence
  Synthetically generated peptide
  VARIANT (1)..(17): Xaa = Any Amino Acid
CCEXXXLACNPACTGXA

SEQ ID NO: 8978 - protein, 16 aa, Artificial Sequence
  Synthetically generated peptide
  VARIANT (1)..(16): Xaa = Any Amino Acid
CCEXXLXACNPACTGA

SEQ ID NO: 8979 - protein, 17 aa, Artificial Sequence
  Synthetically generated peptide
  VARIANT (1)..(17): Xaa = Any Amino Acid
CCEXXLXXACNPACTGA

SEQ ID NO: 8980 - protein, 17 aa, Artificial Sequence
  Synthetically generated peptide
  VARIANT (1)..(17): Xaa = Any Amino Acid
CCEXXLXACXNPACTGA

SEQ ID NO: 8981 - protein, 17 aa, Artificial Sequence
  Synthetically generated peptide
  VARIANT (1)..(17): Xaa = Any Amino Acid
CCEXXLXACNXPACTGA

SEQ ID NO: 8982 - protein, 17 aa, Artificial Sequence
  Synthetically generated peptide
  VARIANT (1)..(17): Xaa = Any Amino Acid
CCEXXLXACNPXACTGA

SEQ ID NO: 8983 - protein, 17 aa, Artificial Sequence
  Synthetically generated peptide
  VARIANT (1)..(17): Xaa = Any Amino Acid
CCEXXLXACNPAXCTGA

SEQ ID NO: 8984 - protein, 17 aa, Artificial Sequence
  Synthetically generated peptide
  VARIANT (1)..(17): Xaa = Any Amino Acid
CCEXXLXACNPACXTGA

SEQ ID NO: 8985 - protein, 17 aa, Artificial Sequence
  Synthetically generated peptide
  VARIANT (1)..(17): Xaa = Any Amino Acid
CCEXXLXACNPACTXGA

SEQ ID NO: 8986 - protein, 17 aa, Artificial Sequence
  Synthetically generated peptide
  VARIANT (1)..(17): Xaa = Any Amino Acid
CCEXXLXACNPACTGXA

SEQ ID NO: 8987 - protein, 16 aa, Artificial Sequence
  Synthetically generated peptide
  VARIANT (1)..(16): Xaa = Any Amino Acid
CCEXXLACXNPACTGA

SEQ ID NO: 8988 - protein, 17 aa, Artificial Sequence
  Synthetically generated peptide
  VARIANT (1)..(17): Xaa = Any Amino Acid
CCEXXLACXXNPACTGA

SEQ ID NO: 8989 - protein, 17 aa, Artificial Sequence
  Synthetically generated peptide
  VARIANT (1)..(17): Xaa = Any Amino Acid
CCEXXLACXNXPACTGA

SEQ ID NO: 8990 - protein, 17 aa, Artificial Sequence
  Synthetically generated peptide
  VARIANT (1)..(17): Xaa = Any Amino Acid
CCEXXLACXNPXACTGA

SEQ ID NO: 8991 - protein, 17 aa, Artificial Sequence
  Synthetically generated peptide
  VARIANT (1)..(17): Xaa = Any Amino Acid
CCEXXLACXNPAXCTGA

SEQ ID NO: 8992 - protein, 17 aa, Artificial Sequence
  Synthetically generated peptide
  VARIANT (1)..(17): Xaa = Any Amino Acid
CCEXXLACXNPACXTGA

SEQ ID NO: 8993 - protein, 17 aa, Artificial Sequence
  Synthetically generated peptide
  VARIANT (1)..(17): Xaa = Any Amino Acid
CCEXXLACXNPACTXGA

SEQ ID NO: 8994 - protein, 17 aa, Artificial Sequence
  Synthetically generated peptide
  VARIANT (1)..(17): Xaa = Any Amino Acid
CCEXXLACXNPACTGXA

SEQ ID NO: 8995 - protein, 16 aa, Artificial Sequence
  Synthetically generated peptide
  VARIANT (1)..(16): Xaa = Any Amino Acid
CCEXXLACNXPACTGA

SEQ ID NO: 8996 - protein, 17 aa, Artificial Sequence
  Synthetically generated peptide
  VARIANT (1)..(17): Xaa = Any Amino Acid
CCEXXLACNXXPACTGA

SEQ ID NO: 8997 - protein, 17 aa, Artificial Sequence
  Synthetically generated peptide
  VARIANT (1)..(17): Xaa = Any Amino Acid
CCEXXLACNXPXACTGA

SEQ ID NO: 8998 - protein, 17 aa, Artificial Sequence
  Synthetically generated peptide
  VARIANT (1)..(17): Xaa = Any Amino Acid
CCEXXLACNXPAXCTGA

SEQ ID NO: 8999 - protein, 17 aa, Artificial Sequence
  Synthetically generated peptide
  VARIANT (1)..(17): Xaa = Any Amino Acid
CCEXXLACNXPACXTGA

SEQ ID NO: 9000 - protein, 17 aa, Artificial Sequence
  Synthetically generated peptide
  VARIANT (1)..(17): Xaa = Any Amino Acid
CCEXXLACNXPACTXGA

SEQ ID NO: 9001 - protein, 17 aa, Artificial Sequence
  Synthetically generated peptide
  VARIANT (1)..(17): Xaa = Any Amino Acid
CCEXXLACNXPACTGXA

SEQ ID NO: 9002 - protein, 16 aa, Artificial Sequence
  Synthetically generated peptide
  VARIANT (1)..(16): Xaa = Any Amino Acid
CCEXXLACNPXACTGA

SEQ ID NO: 9003 - protein, 17 aa, Artificial Sequence
  Synthetically generated peptide
  VARIANT (1)..(17): Xaa = Any Amino Acid
CCEXXLACNPXXACTGA

SEQ ID NO: 9004 - protein, 17 aa, Artificial Sequence
  Synthetically generated peptide
  VARIANT (1)..(17): Xaa = Any Amino Acid
CCEXXLACNPXAXCTGA

SEQ ID NO: 9005 - protein, 17 aa, Artificial Sequence
  Synthetically generated peptide
  VARIANT (1)..(17): Xaa = Any Amino Acid
CCEXXLACNPXACXTGA

SEQ ID NO: 9006 - protein, 17 aa, Artificial Sequence
  Synthetically generated peptide
  VARIANT (1)..(17): Xaa = Any Amino Acid
CCEXXLACNPXACTXGA

SEQ ID NO: 9007 - protein, 17 aa, Artificial Sequence
  Synthetically generated peptide
  VARIANT (1)..(17): Xaa = Any Amino Acid
CCEXXLACNPXACTGXA

SEQ ID NO: 9008 - protein, 16 aa, Artificial Sequence
  Synthetically generated peptide
  VARIANT (1)..(16): Xaa = Any Amino Acid
CCEXXLACNPAXCTGA

SEQ ID NO: 9009 - protein, 17 aa, Artificial Sequence
  Synthetically generated peptide
  VARIANT (1)..(17): Xaa = Any Amino Acid
CCEXXLACNPAXXCTGA

SEQ ID NO: 9010 - protein, 17 aa, Artificial Sequence
  Synthetically generated peptide
  VARIANT (1)..(17): Xaa = Any Amino Acid
CCEXXLACNPAXCXTGA

SEQ ID NO: 9011 - protein, 17 aa, Artificial Sequence
  Synthetically generated peptide
  VARIANT (1)..(17): Xaa = Any Amino Acid
CCEXXLACNPAXCTXGA

SEQ ID NO: 9012 - protein, 17 aa, Artificial Sequence
  Synthetically generated peptide
  VARIANT (1)..(17): Xaa = Any Amino Acid
CCEXXLACNPAXCTGXA

SEQ ID NO: 9013 - protein, 16 aa, Artificial Sequence
  Synthetically generated peptide
  VARIANT (1)..(16): Xaa = Any Amino Acid
CCEXXLACNPACXTGA

SEQ ID NO: 9014 - protein, 17 aa, Artificial Sequence
  Synthetically generated peptide
  VARIANT (1)..(17): Xaa = Any Amino Acid
CCEXXLACNPACXXTGA

SEQ ID NO: 9015 - protein, 17 aa, Artificial Sequence
  Synthetically generated peptide
  VARIANT (1)..(17): Xaa = Any Amino Acid
CCEXXLACNPACXTXGA

SEQ ID NO: 9016 - protein, 17 aa, Artificial Sequence
  Synthetically generated peptide
  VARIANT (1)..(17): Xaa = Any Amino Acid
CCEXXLACNPACXTGXA

SEQ ID NO: 9017 - protein, 16 aa, Artificial Sequence
  Synthetically generated peptide
  VARIANT (1)..(16): Xaa = Any Amino Acid
CCEXXLACNPACTXGA

SEQ ID NO: 9018 - protein, 17 aa, Artificial Sequence
  Synthetically generated peptide
  VARIANT (1)..(17): Xaa = Any Amino Acid
CCEXXLACNPACTXXGA

SEQ ID NO: 9019 - protein, 17 aa, Artificial Sequence
  Synthetically generated peptide
  VARIANT (1)..(17): Xaa = Any Amino Acid
CCEXXLACNPACTXGXA

SEQ ID NO: 9020 - protein, 16 aa, Artificial Sequence
  Synthetically generated peptide
  VARIANT (1)..(16): Xaa = Any Amino Acid
CCEXXLACNPACTGXA

SEQ ID NO: 9021 - protein, 17 aa, Artificial Sequence
  Synthetically generated peptide
  VARIANT (1)..(17): Xaa = Any Amino Acid
CCEXXLACNPACTGXXA

SEQ ID NO: 9022 - protein, 15 aa, Artificial Sequence
  Synthetically generated peptide
  VARIANT (1)..(15): Xaa = Any Amino Acid
CCEXLXACNPACTGA

SEQ ID NO: 9023 - protein, 16 aa, Artificial Sequence
  Synthetically generated peptide
  VARIANT (1)..(16): Xaa = Any Amino Acid
CCEXLXXACNPACTGA

SEQ ID NO: 9024 - protein, 17 aa, Artificial Sequence
  Synthetically generated peptide
  VARIANT (1)..(17): Xaa = Any Amino Acid
CCEXLXXXACNPACTGA

SEQ ID NO: 9025 - protein, 17 aa, Artificial Sequence
  Synthetically generated peptide
  VARIANT (1)..(17): Xaa = Any Amino Acid
CCEXLXXACXNPACTGA

SEQ ID NO: 9026 - protein, 17 aa, Artificial Sequence
  Synthetically generated peptide
  VARIANT (1)..(17): Xaa = Any Amino Acid
CCEXLXXACNXPACTGA

SEQ ID NO: 9027 - protein, 17 aa, Artificial Sequence
  Synthetically generated peptide
  VARIANT (1)..(17): Xaa = Any Amino Acid
CCEXLXXACNPXACTGA

SEQ ID NO: 9028 - protein, 17 aa, Artificial Sequence
  Synthetically generated peptide
  VARIANT (1)..(17): Xaa = Any Amino Acid
CCEXLXXACNPAXCTGA

SEQ ID NO: 9029 - protein, 17 aa, Artificial Sequence
  Synthetically generated peptide
  VARIANT (1)..(17): Xaa = Any Amino Acid
CCEXLXXACNPACXTGA

SEQ ID NO: 9030 - protein, 17 aa, Artificial Sequence
  Synthetically generated peptide
  VARIANT (1)..(17): Xaa = Any Amino Acid
CCEXLXXACNPACTXGA

SEQ ID NO: 9031 - protein, 17 aa, Artificial Sequence
  Synthetically generated peptide
  VARIANT (1)..(17): Xaa = Any Amino Acid
CCEXLXXACNPACTGXA

SEQ ID NO: 9032 - protein, 16 aa, Artificial Sequence
  Synthetically generated peptide
  VARIANT (1)..(16): Xaa = Any Amino Acid
CCEXLXACXNPACTGA

SEQ ID NO: 9033 - protein, 17 aa, Artificial Sequence
  Synthetically generated peptide
  VARIANT (1)..(17): Xaa = Any Amino Acid
CCEXLXACXXNPACTGA

SEQ ID NO: 9034 - protein, 17 aa, Artificial Sequence
  Synthetically generated peptide
  VARIANT (1)..(17): Xaa = Any Amino Acid
CCEXLXACXNXPACTGA

SEQ ID NO: 9035 - protein, 17 aa, Artificial Sequence
  Synthetically generated peptide
  VARIANT (1)..(17): Xaa = Any Amino Acid
CCEXLXACXNPXACTGA

SEQ ID NO: 9036 - protein, 17 aa, Artificial Sequence
  Synthetically generated peptide
  VARIANT (1)..(17): Xaa = Any Amino Acid
CCEXLXACXNPAXCTGA

SEQ ID NO: 9037 - protein, 17 aa, Artificial Sequence
  Synthetically generated peptide
  VARIANT (1)..(17): Xaa = Any Amino Acid
CCEXLXACXNPACXTGA

SEQ ID NO: 9038 - protein, 17 aa, Artificial Sequence
  Synthetically generated peptide
  VARIANT (1)..(17): Xaa = Any Amino Acid
CCEXLXACXNPACTXGA

SEQ ID NO: 9039 - protein, 17 aa, Artificial Sequence
  Synthetically generated peptide
  VARIANT (1)..(17): Xaa = Any Amino Acid
CCEXLXACXNPACTGXA

SEQ ID NO: 9040 - protein, 16 aa, Artificial Sequence
  Synthetically generated peptide
  VARIANT (1)..(16): Xaa = Any Amino Acid
CCEXLXACNXPACTGA

SEQ ID NO: 9041 - protein, 17 aa, Artificial Sequence
  Synthetically generated peptide
  VARIANT (1)..(17): Xaa = Any Amino Acid
CCEXLXACNXXPACTGA

SEQ ID NO: 9042 - protein, 17 aa, Artificial Sequence
  Synthetically generated peptide
  VARIANT (1)..(17): Xaa = Any Amino Acid
CCEXLXACNXPXACTGA

SEQ ID NO: 9043 - protein, 17 aa, Artificial Sequence
  Synthetically generated peptide
  VARIANT (1)..(17): Xaa = Any Amino Acid
CCEXLXACNXPAXCTGA

SEQ ID NO: 9044 - protein, 17 aa, Artificial Sequence
  Synthetically generated peptide
  VARIANT (1)..(17): Xaa = Any Amino Acid
CCEXLXACNXPACXTGA

SEQ ID NO: 9045 - protein, 17 aa, Artificial Sequence
  Synthetically generated peptide
  VARIANT (1)..(17): Xaa = Any Amino Acid
CCEXLXACNXPACTXGA

SEQ ID NO: 9046 - protein, 17 aa, Artificial Sequence
  Synthetically generated peptide
  VARIANT (1)..(17): Xaa = Any Amino Acid
CCEXLXACNXPACTGXA

SEQ ID NO: 9047 - protein, 16 aa, Artificial Sequence
  Synthetically generated peptide
  VARIANT (1)..(16): Xaa = Any Amino Acid
CCEXLXACNPXACTGA

SEQ ID NO: 9048 - protein, 17 aa, Artificial Sequence
  Synthetically generated peptide
  VARIANT (1)..(17): Xaa = Any Amino Acid
CCEXLXACNPXXACTGA

SEQ ID NO: 9049 - protein, 17 aa, Artificial Sequence
  Synthetically generated peptide
  VARIANT (1)..(17): Xaa = Any Amino Acid
CCEXLXACNPXAXCTGA

SEQ ID NO: 9050 - protein, 17 aa, Artificial Sequence
  Synthetically generated peptide
  VARIANT (1)..(17): Xaa = Any Amino Acid
CCEXLXACNPXACXTGA

SEQ ID NO: 9051 - protein, 17 aa, Artificial Sequence
  Synthetically generated peptide
  VARIANT (1)..(17): Xaa = Any Amino Acid
CCEXLXACNPXACTXGA

SEQ ID NO: 9052 - protein, 17 aa, Artificial Sequence
  Synthetically generated peptide
  VARIANT (1)..(17): Xaa = Any Amino Acid
CCEXLXACNPXACTGXA

SEQ ID NO: 9053 - protein, 16 aa, Artificial Sequence
  Synthetically generated peptide
  VARIANT (1)..(16): Xaa = Any Amino Acid
CCEXLXACNPAXCTGA

SEQ ID NO: 9054 - protein, 17 aa, Artificial Sequence
  Synthetically generated peptide
  VARIANT (1)..(17): Xaa = Any Amino Acid
CCEXLXACNPAXXCTGA

SEQ ID NO: 9055 - protein, 17 aa, Artificial Sequence
  Synthetically generated peptide
  VARIANT (1)..(17): Xaa = Any Amino Acid
CCEXLXACNPAXCXTGA

SEQ ID NO: 9056 - protein, 17 aa, Artificial Sequence
  Synthetically generated peptide
  VARIANT (1)..(17): Xaa = Any Amino Acid
CCEXLXACNPAXCTXGA

SEQ ID NO: 9057 - protein, 17 aa, Artificial Sequence
  Synthetically generated peptide
  VARIANT (1)..(17): Xaa = Any Amino Acid
CCEXLXACNPAXCTGXA

SEQ ID NO: 9058 - protein, 16 aa, Artificial Sequence
  Synthetically generated peptide
  VARIANT (1)..(16): Xaa = Any Amino Acid
CCEXLXACNPACXTGA

SEQ ID NO: 9059 - protein, 17 aa, Artificial Sequence
  Synthetically generated peptide
  VARIANT (1)..(17): Xaa = Any Amino Acid
CCEXLXACNPACXXTGA

SEQ ID NO: 9060 - protein, 17 aa, Artificial Sequence
  Synthetically generated peptide
  VARIANT (1)..(17): Xaa = Any Amino Acid
CCEXLXACNPACXTXGA

SEQ ID NO: 9061 - protein, 17 aa, Artificial Sequence
  Synthetically generated peptide
  VARIANT (1)..(17): Xaa = Any Amino Acid
CCEXLXACNPACXTGXA

SEQ ID NO: 9062 - protein, 16 aa, Artificial Sequence
  Synthetically generated peptide
  VARIANT (1)..(16): Xaa = Any Amino Acid
CCEXLXACNPACTXGA

SEQ ID NO: 9063 - protein, 17 aa, Artificial Sequence
  Synthetically generated peptide
  VARIANT (1)..(17): Xaa = Any Amino Acid
CCEXLXACNPACTXXGA

SEQ ID NO: 9064 - protein, 17 aa, Artificial Sequence
  Synthetically generated peptide
  VARIANT (1)..(17): Xaa = Any Amino Acid
CCEXLXACNPACTXGXA

SEQ ID NO: 9065 - protein, 16 aa, Artificial Sequence
  Synthetically generated peptide
  VARIANT (1)..(16): Xaa = Any Amino Acid
CCEXLXACNPACTGXA

SEQ ID NO: 9066 - protein, 17 aa, Artificial Sequence
  Synthetically generated peptide
  VARIANT (1)..(17): Xaa = Any Amino Acid
CCEXLXACNPACTGXXA

SEQ ID NO: 9067 - protein, 15 aa, Artificial Sequence
  Synthetically generated peptide
  VARIANT (1)..(15): Xaa = Any Amino Acid
CCEXLACXNPACTGA

SEQ ID NO: 9068 - protein, 16 aa, Artificial Sequence
  Synthetically generated peptide
  VARIANT (1)..(16): Xaa = Any Amino Acid
CCEXLACXXNPACTGA

SEQ ID NO: 9069 - protein, 17 aa, Artificial Sequence
  Synthetically generated peptide
  VARIANT (1)..(17): Xaa = Any Amino Acid
CCEXLACXXXNPACTGA

SEQ ID NO: 9070 - protein, 17 aa, Artificial Sequence
  Synthetically generated peptide
  VARIANT (1)..(17): Xaa = Any Amino Acid
CCEXLACXXNXPACTGA

SEQ ID NO: 9071 - protein, 17 aa, Artificial Sequence
  Synthetically generated peptide
  VARIANT (1)..(17): Xaa = Any Amino Acid
CCEXLACXXNPXACTGA

SEQ ID NO: 9072 - protein, 17 aa, Artificial Sequence
  Synthetically generated peptide
  VARIANT (1)..(17): Xaa = Any Amino Acid
CCEXLACXXNPAXCTGA

SEQ ID NO: 9073 - protein, 17 aa, Artificial Sequence
  Synthetically generated peptide
  VARIANT (1)..(17): Xaa = Any Amino Acid
CCEXLACXXNPACXTGA

SEQ ID NO: 9074 - protein, 17 aa, Artificial Sequence
  Synthetically generated peptide
  VARIANT (1)..(17): Xaa = Any Amino Acid
CCEXLACXXNPACTXGA

SEQ ID NO: 9075 - protein, 17 aa, Artificial Sequence
  Synthetically generated peptide
  VARIANT (1)..(17): Xaa = Any Amino Acid
CCEXLACXXNPACTGXA

SEQ ID NO: 9076 - protein, 16 aa, Artificial Sequence
  Synthetically generated peptide
  VARIANT (1)..(16): Xaa = Any Amino Acid
CCEXLACXNXPACTGA

SEQ ID NO: 9077 - protein, 17 aa, Artificial Sequence
  Synthetically generated peptide
  VARIANT (1)..(17): Xaa = Any Amino Acid
CCEXLACXNXXPACTGA

SEQ ID NO: 9078 - protein, 17 aa, Artificial Sequence
  Synthetically generated peptide
  VARIANT (1)..(17): Xaa = Any Amino Acid
CCEXLACXNXPXACTGA

SEQ ID NO: 9079 - protein, 17 aa, Artificial Sequence
  Synthetically generated peptide
  VARIANT (1)..(17): Xaa = Any Amino Acid
CCEXLACXNXPAXCTGA

SEQ ID NO: 9080 - protein, 17 aa, Artificial Sequence
  Synthetically generated peptide
  VARIANT (1)..(17): Xaa = Any Amino Acid
CCEXLACXNXPACXTGA

SEQ ID NO: 9081 - protein, 17 aa, Artificial Sequence
  Synthetically generated peptide
  VARIANT (1)..(17): Xaa = Any Amino Acid
CCEXLACXNXPACTXGA

SEQ ID NO: 9082 - protein, 17 aa, Artificial Sequence
  Synthetically generated peptide
  VARIANT (1)..(17): Xaa = Any Amino Acid
CCEXLACXNXPACTGXA

SEQ ID NO: 9083 - protein, 16 aa, Artificial Sequence
  Synthetically generated peptide
  VARIANT (1)..(16): Xaa = Any Amino Acid
CCEXLACXNPXACTGA

SEQ ID NO: 9084 - protein, 17 aa, Artificial Sequence
  Synthetically generated peptide
  VARIANT (1)..(17): Xaa = Any Amino Acid
CCEXLACXNPXXACTGA

SEQ ID NO: 9085 - protein, 17 aa, Artificial Sequence
  Synthetically generated peptide
  VARIANT (1)..(17): Xaa = Any Amino Acid
CCEXLACXNPXAXCTGA

SEQ ID NO: 9086 - protein, 17 aa, Artificial Sequence
  Synthetically generated peptide
  VARIANT (1)..(17): Xaa = Any Amino Acid
CCEXLACXNPXACXTGA

SEQ ID NO: 9087 - protein, 17 aa, Artificial Sequence
  Synthetically generated peptide
  VARIANT (1)..(17): Xaa = Any Amino Acid
CCEXLACXNPXACTXGA

SEQ ID NO: 9088 - protein, 17 aa, Artificial Sequence
  Synthetically generated peptide
  VARIANT (1)..(17): Xaa = Any Amino Acid
CCEXLACXNPXACTGXA

SEQ ID NO: 9089 - protein, 16 aa, Artificial Sequence
  Synthetically generated peptide
  VARIANT (1)..(16): Xaa = Any Amino Acid
CCEXLACXNPAXCTGA

SEQ ID NO: 9090 - protein, 17 aa, Artificial Sequence
  Synthetically generated peptide
  VARIANT (1)..(17): Xaa = Any Amino Acid
CCEXLACXNPAXXCTGA

SEQ ID NO: 9091 - protein, 17 aa, Artificial Sequence
  Synthetically generated peptide
  VARIANT (1)..(17): Xaa = Any Amino Acid
CCEXLACXNPAXCXTGA

SEQ ID NO: 9092 - protein, 17 aa, Artificial Sequence
  Synthetically generated peptide
  VARIANT (1)..(17): Xaa = Any Amino Acid
CCEXLACXNPAXCTXGA

SEQ ID NO: 9093 - protein, 17 aa, Artificial Sequence
  Synthetically generated peptide
  VARIANT (1)..(17): Xaa = Any Amino Acid
CCEXLACXNPAXCTGXA

SEQ ID NO: 9094 - protein, 16 aa, Artificial Sequence
  Synthetically generated peptide
  VARIANT (1)..(16): Xaa = Any Amino Acid
CCEXLACXNPACXTGA

SEQ ID NO: 9095 - protein, 17 aa, Artificial Sequence
  Synthetically generated peptide
  VARIANT (1)..(17): Xaa = Any Amino Acid
CCEXLACXNPACXXTGA

SEQ ID NO: 9096 - protein, 17 aa, Artificial Sequence
  Synthetically generated peptide
  VARIANT (1)..(17): Xaa = Any Amino Acid
CCEXLACXNPACXTXGA

SEQ ID NO: 9097 - protein, 17 aa, Artificial Sequence
  Synthetically generated peptide
  VARIANT (1)..(17): Xaa = Any Amino Acid
CCEXLACXNPACXTGXA

SEQ ID NO: 9098 - protein, 16 aa, Artificial Sequence
  Synthetically generated peptide
  VARIANT (1)..(16): Xaa = Any Amino Acid
CCEXLACXNPACTXGA

SEQ ID NO: 9099 - protein, 17 aa, Artificial Sequence
  Synthetically generated peptide
  VARIANT (1)..(17): Xaa = Any Amino Acid
CCEXLACXNPACTXXGA

SEQ ID NO: 9100 - protein, 17 aa, Artificial Sequence
  Synthetically generated peptide
  VARIANT (1)..(17): Xaa = Any Amino Acid
CCEXLACXNPACTXGXA

SEQ ID NO: 9101 - protein, 16 aa, Artificial Sequence
  Synthetically generated peptide
  VARIANT (1)..(16): Xaa = Any Amino Acid
CCEXLACXNPACTGXA

SEQ ID NO: 9102 - protein, 17 aa, Artificial Sequence
  Synthetically generated peptide
  VARIANT (1)..(17): Xaa = Any Amino Acid
CCEXLACXNPACTGXXA

SEQ ID NO: 9103 - protein, 15 aa, Artificial Sequence
  Synthetically generated peptide
  VARIANT (1)..(15): Xaa = Any Amino Acid
CCEXLACNXPACTGA

SEQ ID NO: 9104 - protein, 16 aa, Artificial Sequence
  Synthetically generated peptide
  VARIANT (1)..(16): Xaa = Any Amino Acid
CCEXLACNXXPACTGA

SEQ ID NO: 9105 - protein, 17 aa, Artificial Sequence
  Synthetically generated peptide
  VARIANT (1)..(17): Xaa = Any Amino Acid
CCEXLACNXXXPACTGA

SEQ ID NO: 9106 - protein, 17 aa, Artificial Sequence
  Synthetically generated peptide
  VARIANT (1)..(17): Xaa = Any Amino Acid
CCEXLACNXXPXACTGA

SEQ ID NO: 9107 - protein, 17 aa, Artificial Sequence
  Synthetically generated peptide
  VARIANT (1)..(17): Xaa = Any Amino Acid
CCEXLACNXXPAXCTGA

SEQ ID NO: 9108 - protein, 17 aa, Artificial Sequence
  Synthetically generated peptide
  VARIANT (1)..(17): Xaa = Any Amino Acid
CCEXLACNXXPACXTGA

SEQ ID NO: 9109 - protein, 17 aa, Artificial Sequence
  Synthetically generated peptide
  VARIANT (1)..(17): Xaa = Any Amino Acid
CCEXLACNXXPACTXGA

SEQ ID NO: 9110 - protein, 17 aa, Artificial Sequence
  Synthetically generated peptide
  VARIANT (1)..(17): Xaa = Any Amino Acid
CCEXLACNXXPACTGXA

SEQ ID NO: 9111 - protein, 16 aa, Artificial Sequence
  Synthetically generated peptide
  VARIANT (1)..(16): Xaa = Any Amino Acid
CCEXLACNXPXACTGA

SEQ ID NO: 9112 - protein, 17 aa, Artificial Sequence
  Synthetically generated peptide
  VARIANT (1)..(17): Xaa = Any Amino Acid
CCEXLACNXPXXACTGA

SEQ ID NO: 9113 - protein, 17 aa, Artificial Sequence
  Synthetically generated peptide
  VARIANT (1)..(17): Xaa = Any Amino Acid
CCEXLACNXPXAXCTGA

SEQ ID NO: 9114 - protein, 17 aa, Artificial Sequence
  Synthetically generated peptide
  VARIANT (1)..(17): Xaa = Any Amino Acid
CCEXLACNXPXACXTGA

SEQ ID NO: 9115 - protein, 17 aa, Artificial Sequence
  Synthetically generated peptide
  VARIANT (1)..(17): Xaa = Any Amino Acid
CCEXLACNXPXACTXGA

SEQ ID NO: 9116 - protein, 17 aa, Artificial Sequence
  Synthetically generated peptide
  VARIANT (1)..(17): Xaa = Any Amino Acid
CCEXLACNXPXACTGXA

SEQ ID NO: 9117 - protein, 16 aa, Artificial Sequence
  Synthetically generated peptide
  VARIANT (1)..(16): Xaa = Any Amino Acid
CCEXLACNXPAXCTGA

SEQ ID NO: 9118 - protein, 17 aa, Artificial Sequence
  Synthetically generated peptide
  VARIANT (1)..(17): Xaa = Any Amino Acid
CCEXLACNXPAXXCTGA

SEQ ID NO: 9119 - protein, 17 aa, Artificial Sequence
  Synthetically generated peptide
  VARIANT (1)..(17): Xaa = Any Amino Acid
CCEXLACNXPAXCXTGA

SEQ ID NO: 9120 - protein, 17 aa, Artificial Sequence
  Synthetically generated peptide
  VARIANT (1)..(17): Xaa = Any Amino Acid
CCEXLACNXPAXCTXGA

SEQ ID NO: 9121 - protein, 17 aa, Artificial Sequence
  Synthetically generated peptide
  VARIANT (1)..(17): Xaa = Any Amino Acid
CCEXLACNXPAXCTGXA

SEQ ID NO: 9122 - protein, 16 aa, Artificial Sequence
  Synthetically generated peptide
  VARIANT (1)..(16): Xaa = Any Amino Acid
CCEXLACNXPACXTGA

SEQ ID NO: 9123 - protein, 17 aa, Artificial Sequence
  Synthetically generated peptide
  VARIANT (1)..(17): Xaa = Any Amino Acid
CCEXLACNXPACXXTGA

SEQ ID NO: 9124 - protein, 17 aa, Artificial Sequence
  Synthetically generated peptide
  VARIANT (1)..(17): Xaa = Any Amino Acid
CCEXLACNXPACXTXGA

SEQ ID NO: 9125 - protein, 17 aa, Artificial Sequence
  Synthetically generated peptide
  VARIANT (1)..(17): Xaa = Any Amino Acid
CCEXLACNXPACXTGXA

SEQ ID NO: 9126 - protein, 16 aa, Artificial Sequence
  Synthetically generated peptide
  VARIANT (1)..(16): Xaa = Any Amino Acid
CCEXLACNXPACTXGA

SEQ ID NO: 9127 - protein, 17 aa, Artificial Sequence
  Synthetically generated peptide
  VARIANT (1)..(17): Xaa = Any Amino Acid
CCEXLACNXPACTXXGA

SEQ ID NO: 9128 - protein, 17 aa, Artificial Sequence
  Synthetically generated peptide
  VARIANT (1)..(17): Xaa = Any Amino Acid
CCEXLACNXPACTXGXA

SEQ ID NO: 9129 - protein, 16 aa, Artificial Sequence
  Synthetically generated peptide
  VARIANT (1)..(16): Xaa = Any Amino Acid
CCEXLACNXPACTGXA

SEQ ID NO: 9130 - protein, 17 aa, Artificial Sequence
  Synthetically generated peptide
  VARIANT (1)..(17): Xaa = Any Amino Acid
CCEXLACNXPACTGXXA

SEQ ID NO: 9131 - protein, 15 aa, Artificial Sequence
  Synthetically generated peptide
  VARIANT (1)..(15): Xaa = Any Amino Acid
CCEXLACNPXACTGA

SEQ ID NO: 9132 - protein, 16 aa, Artificial Sequence
  Synthetically generated peptide
  VARIANT (1)..(16): Xaa = Any Amino Acid
CCEXLACNPXXACTGA

SEQ ID NO: 9133 - protein, 17 aa, Artificial Sequence
  Synthetically generated peptide
  VARIANT (1)..(17): Xaa = Any Amino Acid
CCEXLACNPXXXACTGA

SEQ ID NO: 9134 - protein, 17 aa, Artificial Sequence
  Synthetically generated peptide
  VARIANT (1)..(17): Xaa = Any Amino Acid
CCEXLACNPXXAXCTGA

SEQ ID NO: 9135 - protein, 17 aa, Artificial Sequence
  Synthetically generated peptide
  VARIANT (1)..(17): Xaa = Any Amino Acid
CCEXLACNPXXACXTGA

SEQ ID NO: 9136 - protein, 17 aa, Artificial Sequence
  Synthetically generated peptide
  VARIANT (1)..(17): Xaa = Any Amino Acid
CCEXLACNPXXACTXGA

SEQ ID NO: 9137 - protein, 17 aa, Artificial Sequence
  Synthetically generated peptide
  VARIANT (1)..(17): Xaa = Any Amino Acid
CCEXLACNPXXACTGXA

SEQ ID NO: 9138 - protein, 16 aa, Artificial Sequence
  Synthetically generated peptide
  VARIANT (1)..(16): Xaa = Any Amino Acid
CCEXLACNPXAXCTGA

SEQ ID NO: 9139 - protein, 17 aa, Artificial Sequence
  Synthetically generated peptide
  VARIANT (1)..(17): Xaa = Any Amino Acid
CCEXLACNPXAXXCTGA

SEQ ID NO: 9140 - protein, 17 aa, Artificial Sequence
  Synthetically generated peptide
  VARIANT (1)..(17): Xaa = Any Amino Acid
CCEXLACNPXAXCXTGA

SEQ ID NO: 9141 - protein, 17 aa, Artificial Sequence
  Synthetically generated peptide
  VARIANT (1)..(17): Xaa = Any Amino Acid
CCEXLACNPXAXCTXGA

SEQ ID NO: 9142 - protein, 17 aa, Artificial Sequence
  Synthetically generated peptide
  VARIANT (1)..(17): Xaa = Any Amino Acid
CCEXLACNPXAXCTGXA

SEQ ID NO: 9143 - protein, 16 aa, Artificial Sequence
  Synthetically generated peptide
  VARIANT (1)..(16): Xaa = Any Amino Acid
CCEXLACNPXACXTGA

SEQ ID NO: 9144 - protein, 17 aa, Artificial Sequence
  Synthetically generated peptide
  VARIANT (1)..(17): Xaa = Any Amino Acid
CCEXLACNPXACXXTGA

SEQ ID NO: 9145 - protein, 17 aa, Artificial Sequence
  Synthetically generated peptide
  VARIANT (1)..(17): Xaa = Any Amino Acid
CCEXLACNPXACXTXGA

SEQ ID NO: 9146 - protein, 17 aa, Artificial Sequence
  Synthetically generated peptide
  VARIANT (1)..(17): Xaa = Any Amino Acid
CCEXLACNPXACXTGXA

SEQ ID NO: 9147 - protein, 16 aa, Artificial Sequence
  Synthetically generated peptide
  VARIANT (1)..(16): Xaa = Any Amino Acid
CCEXLACNPXACTXGA

SEQ ID NO: 9148 - protein, 17 aa, Artificial Sequence
  Synthetically generated peptide
  VARIANT (1)..(17): Xaa = Any Amino Acid
CCEXLACNPXACTXXGA

SEQ ID NO: 9149 - protein, 17 aa, Artificial Sequence
  Synthetically generated peptide
  VARIANT (1)..(17): Xaa = Any Amino Acid
CCEXLACNPXACTXGXA

SEQ ID NO: 9150 - protein, 16 aa, Artificial Sequence
  Synthetically generated peptide
  VARIANT (1)..(16): Xaa = Any Amino Acid
CCEXLACNPXACTGXA

SEQ ID NO: 9151 - protein, 17 aa, Artificial Sequence
  Synthetically generated peptide
  VARIANT (1)..(17): Xaa = Any Amino Acid
CCEXLACNPXACTGXXA

SEQ ID NO: 9152 - protein, 15 aa, Artificial Sequence
  Synthetically generated peptide
  VARIANT (1)..(15): Xaa = Any Amino Acid
CCEXLACNPAXCTGA

SEQ ID NO: 9153 - protein, 16 aa, Artificial Sequence
  Synthetically generated peptide
  VARIANT (1)..(16): Xaa = Any Amino Acid
CCEXLACNPAXXCTGA

SEQ ID NO: 9154 - protein, 17 aa, Artificial Sequence
  Synthetically generated peptide
  VARIANT (1)..(17): Xaa = Any Amino Acid
CCEXLACNPAXXXCTGA

SEQ ID NO: 9155 - protein, 17 aa, Artificial Sequence
  Synthetically generated peptide
  VARIANT (1)..(17): Xaa = Any Amino Acid
CCEXLACNPAXXCXTGA

SEQ ID NO: 9156 - protein, 17 aa, Artificial Sequence
  Synthetically generated peptide
  VARIANT (1)..(17): Xaa = Any Amino Acid
CCEXLACNPAXXCTXGA

SEQ ID NO: 9157 - protein, 17 aa, Artificial Sequence
  Synthetically generated peptide
  VARIANT (1)..(17): Xaa = Any Amino Acid
CCEXLACNPAXXCTGXA

SEQ ID NO: 9158 - protein, 16 aa, Artificial Sequence
  Synthetically generated peptide
  VARIANT (1)..(16): Xaa = Any Amino Acid
CCEXLACNPAXCXTGA

SEQ ID NO: 9159 - protein, 17 aa, Artificial Sequence
  Synthetically generated peptide
  VARIANT (1)..(17): Xaa = Any Amino Acid
CCEXLACNPAXCXXTGA

SEQ ID NO: 9160 - protein, 17 aa, Artificial Sequence
  Synthetically generated peptide
  VARIANT (1)..(17): Xaa = Any Amino Acid
CCEXLACNPAXCXTXGA

SEQ ID NO: 9161 - protein, 17 aa, Artificial Sequence
  Synthetically generated peptide
  VARIANT (1)..(17): Xaa = Any Amino Acid
CCEXLACNPAXCXTGXA

SEQ ID NO: 9162 - protein, 16 aa, Artificial Sequence
  Synthetically generated peptide
  VARIANT (1)..(16): Xaa = Any Amino Acid
CCEXLACNPAXCTXGA

SEQ ID NO: 9163 - protein, 17 aa, Artificial Sequence
  Synthetically generated peptide
  VARIANT (1)..(17): Xaa = Any Amino Acid
CCEXLACNPAXCTXXGA

SEQ ID NO: 9164 - protein, 17 aa, Artificial Sequence
  Synthetically generated peptide
  VARIANT (1)..(17): Xaa = Any Amino Acid
CCEXLACNPAXCTXGXA

SEQ ID NO: 9165 - protein, 16 aa, Artificial Sequence
  Synthetically generated peptide
  VARIANT (1)..(16): Xaa = Any Amino Acid
CCEXLACNPAXCTGXA

SEQ ID NO: 9166 - protein, 17 aa, Artificial Sequence
  Synthetically generated peptide
  VARIANT (1)..(17): Xaa = Any Amino Acid
CCEXLACNPAXCTGXXA

SEQ ID NO: 9167 - protein, 15 aa, Artificial Sequence
  Synthetically generated peptide
  VARIANT (1)..(15): Xaa = Any Amino Acid
CCEXLACNPACXTGA

SEQ ID NO: 9168 - protein, 16 aa, Artificial Sequence
  Synthetically generated peptide
  VARIANT (1)..(16): Xaa = Any Amino Acid
CCEXLACNPACXXTGA

SEQ ID NO: 9169 - protein, 17 aa, Artificial Sequence
  Synthetically generated peptide
  VARIANT (1)..(17): Xaa = Any Amino Acid
CCEXLACNPACXXXTGA

SEQ ID NO: 9170 - protein, 17 aa, Artificial Sequence
  Synthetically generated peptide
  VARIANT (1)..(17): Xaa = Any Amino Acid
CCEXLACNPACXXTXGA

SEQ ID NO: 9171 - protein, 17 aa, Artificial Sequence
  Synthetically generated peptide
  VARIANT (1)..(17): Xaa = Any Amino Acid
CCEXLACNPACXXTGXA

SEQ ID NO: 9172 - protein, 16 aa, Artificial Sequence
  Synthetically generated peptide
  VARIANT (1)..(16): Xaa = Any Amino Acid
CCEXLACNPACXTXGA

SEQ ID NO: 9173 - protein, 17 aa, Artificial Sequence
  Synthetically generated peptide
  VARIANT (1)..(17): Xaa = Any Amino Acid
CCEXLACNPACXTXXGA

SEQ ID NO: 9174 - protein, 17 aa, Artificial Sequence
  Synthetically generated peptide
  VARIANT (1)..(17): Xaa = Any Amino Acid
CCEXLACNPACXTXGXA

SEQ ID NO: 9175 - protein, 16 aa, Artificial Sequence
  Synthetically generated peptide
  VARIANT (1)..(16): Xaa = Any Amino Acid
CCEXLACNPACXTGXA

SEQ ID NO: 9176 - protein, 17 aa, Artificial Sequence
  Synthetically generated peptide
  VARIANT (1)..(17): Xaa = Any Amino Acid
CCEXLACNPACXTGXXA

SEQ ID NO: 9177 - protein, 15 aa, Artificial Sequence
  Synthetically generated peptide
  VARIANT (1)..(15): Xaa = Any Amino Acid
CCEXLACNPACTXGA

SEQ ID NO: 9178 - protein, 16 aa, Artificial Sequence
  Synthetically generated peptide
  VARIANT (1)..(16): Xaa = Any Amino Acid
CCEXLACNPACTXXGA

SEQ ID NO: 9179 - protein, 17 aa, Artificial Sequence
  Synthetically generated peptide
  VARIANT (1)..(17): Xaa = Any Amino Acid
CCEXLACNPACTXXXGA

SEQ ID NO: 9180 - protein, 17 aa, Artificial Sequence
  Synthetically generated peptide
  VARIANT (1)..(17): Xaa = Any Amino Acid
CCEXLACNPACTXXGXA

SEQ ID NO: 9181 - protein, 16 aa, Artificial Sequence
  Synthetically generated peptide
  VARIANT (1)..(16): Xaa = Any Amino Acid
CCEXLACNPACTXGXA

SEQ ID NO: 9182 - protein, 17 aa, Artificial Sequence
  Synthetically generated peptide
  VARIANT (1)..(17): Xaa = Any Amino Acid
CCEXLACNPACTXGXXA

SEQ ID NO: 9183 - protein, 15 aa, Artificial Sequence
  Synthetically generated peptide
  VARIANT (1)..(15): Xaa = Any Amino Acid
CCEXLACNPACTGXA

SEQ ID NO: 9184 - protein, 16 aa, Artificial Sequence
  Synthetically generated peptide
  VARIANT (1)..(16): Xaa = Any Amino Acid
CCEXLACNPACTGXXA

SEQ ID NO: 9185 - protein, 17 aa, Artificial Sequence
  Synthetically generated peptide
  VARIANT (1)..(17): Xaa = Any Amino Acid
CCEXLACNPACTGXXXA

SEQ ID NO: 9186 - protein, 14 aa, Artificial Sequence
  Synthetically generated peptide
  VARIANT (1)..(14): Xaa = Any Amino Acid
CCELXACNPACTGA

SEQ ID NO: 9187 - protein, 15 aa, Artificial Sequence
  Synthetically generated peptide
  VARIANT (1)..(15): Xaa = Any Amino Acid
CCELXXACNPACTGA

SEQ ID NO: 9188 - protein, 16 aa, Artificial Sequence
  Synthetically generated peptide
  VARIANT (1)..(16): Xaa = Any Amino Acid
CCELXXXACNPACTGA

SEQ ID NO: 9189 - protein, 17 aa, Artificial Sequence
  Synthetically generated peptide
  VARIANT (1)..(17): Xaa = Any Amino Acid
CCELXXXXACNPACTGA

SEQ ID NO: 9190 - protein, 17 aa, Artificial Sequence
  Synthetically generated peptide
  VARIANT (1)..(17): Xaa = Any Amino Acid
CCELXXXACXNPACTGA

SEQ ID NO: 9191 - protein, 17 aa, Artificial Sequence
  Synthetically generated peptide
  VARIANT (1)..(17): Xaa = Any Amino Acid
CCELXXXACNXPACTGA

SEQ ID NO: 9192 - protein, 17 aa, Artificial Sequence
  Synthetically generated peptide
  VARIANT (1)..(17): Xaa = Any Amino Acid
CCELXXXACNPXACTGA

SEQ ID NO: 9193 - protein, 17 aa, Artificial Sequence
  Synthetically generated peptide
  VARIANT (1)..(17): Xaa = Any Amino Acid
CCELXXXACNPAXCTGA

SEQ ID NO: 9194 - protein, 17 aa, Artificial Sequence
  Synthetically generated peptide
  VARIANT (1)..(17): Xaa = Any Amino Acid
CCELXXXACNPACXTGA

SEQ ID NO: 9195 - protein, 17 aa, Artificial Sequence
  Synthetically generated peptide
  VARIANT (1)..(17): Xaa = Any Amino Acid
CCELXXXACNPACTXGA

SEQ ID NO: 9196 - protein, 17 aa, Artificial Sequence
  Synthetically generated peptide
  VARIANT (1)..(17): Xaa = Any Amino Acid
CCELXXXACNPACTGXA

SEQ ID NO: 9197 - protein, 16 aa, Artificial Sequence
  Synthetically generated peptide
  VARIANT (1)..(16): Xaa = Any Amino Acid
CCELXXACXNPACTGA

SEQ ID NO: 9198 - protein, 17 aa, Artificial Sequence
  Synthetically generated peptide
  VARIANT (1)..(17): Xaa = Any Amino Acid
CCELXXACXXNPACTGA

SEQ ID NO: 9199 - protein, 17 aa, Artificial Sequence
  Synthetically generated peptide
  VARIANT (1)..(17): Xaa = Any Amino Acid
CCELXXACXNXPACTGA

SEQ ID NO: 9200 - protein, 17 aa, Artificial Sequence
  Synthetically generated peptide
  VARIANT (1)..(17): Xaa = Any Amino Acid
CCELXXACXNPXACTGA

SEQ ID NO: 9201 - protein, 17 aa, Artificial Sequence
  Synthetically generated peptide
  VARIANT (1)..(17): Xaa = Any Amino Acid
CCELXXACXNPAXCTGA

SEQ ID NO: 9202 - protein, 17 aa, Artificial Sequence
  Synthetically generated peptide
  VARIANT (1)..(17): Xaa = Any Amino Acid
CCELXXACXNPACXTGA

SEQ ID NO: 9203 - protein, 17 aa, Artificial Sequence
  Synthetically generated peptide
  VARIANT (1)..(17): Xaa = Any Amino Acid
CCELXXACXNPACTXGA

SEQ ID NO: 9204 - protein, 17 aa, Artificial Sequence
  Synthetically generated peptide
  VARIANT (1)..(17): Xaa = Any Amino Acid
CCELXXACXNPACTGXA

SEQ ID NO: 9205 - protein, 16 aa, Artificial Sequence
  Synthetically generated peptide
  VARIANT (1)..(16): Xaa = Any Amino Acid
CCELXXACNXPACTGA

SEQ ID NO: 9206 - protein, 17 aa, Artificial Sequence
  Synthetically generated peptide
  VARIANT (1)..(17): Xaa = Any Amino Acid
CCELXXACNXXPACTGA

SEQ ID NO: 9207 - protein, 17 aa, Artificial Sequence
  Synthetically generated peptide
  VARIANT (1)..(17): Xaa = Any Amino Acid
CCELXXACNXPXACTGA

SEQ ID NO: 9208 - protein, 17 aa, Artificial Sequence
  Synthetically generated peptide
  VARIANT (1)..(17): Xaa = Any Amino Acid
CCELXXACNXPAXCTGA

SEQ ID NO: 9209 - protein, 17 aa, Artificial Sequence
  Synthetically generated peptide
  VARIANT (1)..(17): Xaa = Any Amino Acid
CCELXXACNXPACXTGA

SEQ ID NO: 9210 - protein, 17 aa, Artificial Sequence
  Synthetically generated peptide
  VARIANT (1)..(17): Xaa = Any Amino Acid
CCELXXACNXPACTXGA

SEQ ID NO: 9211 - protein, 17 aa, Artificial Sequence
  Synthetically generated peptide
  VARIANT (1)..(17): Xaa = Any Amino Acid
CCELXXACNXPACTGXA

SEQ ID NO: 9212 - protein, 16 aa, Artificial Sequence
  Synthetically generated peptide
  VARIANT (1)..(16): Xaa = Any Amino Acid
CCELXXACNPXACTGA

SEQ ID NO: 9213 - protein, 17 aa, Artificial Sequence
  Synthetically generated peptide
  VARIANT (1)..(17): Xaa = Any Amino Acid
CCELXXACNPXXACTGA

SEQ ID NO: 9214 - protein, 17 aa, Artificial Sequence
  Synthetically generated peptide
  VARIANT (1)..(17): Xaa = Any Amino Acid
CCELXXACNPXAXCTGA

SEQ ID NO: 9215 - protein, 17 aa, Artificial Sequence
  Synthetically generated peptide
  VARIANT (1)..(17): Xaa = Any Amino Acid
CCELXXACNPXACXTGA

SEQ ID NO: 9216 - protein, 17 aa, Artificial Sequence
  Synthetically generated peptide
  VARIANT (1)..(17): Xaa = Any Amino Acid
CCELXXACNPXACTXGA

SEQ ID NO: 9217 - protein, 17 aa, Artificial Sequence
  Synthetically generated peptide
  VARIANT (1)..(17): Xaa = Any Amino Acid
CCELXXACNPXACTGXA

SEQ ID NO: 9218 - protein, 16 aa, Artificial Sequence
  Synthetically generated peptide
  VARIANT (1)..(16): Xaa = Any Amino Acid
CCELXXACNPAXCTGA

SEQ ID NO: 9219 - protein, 17 aa, Artificial Sequence
  Synthetically generated peptide
  VARIANT (1)..(17): Xaa = Any Amino Acid
CCELXXACNPAXXCTGA

SEQ ID NO: 9220 - protein, 17 aa, Artificial Sequence
  Synthetically generated peptide
  VARIANT (1)..(17): Xaa = Any Amino Acid
CCELXXACNPAXCXTGA

SEQ ID NO: 9221 - protein, 17 aa, Artificial Sequence
  Synthetically generated peptide
  VARIANT (1)..(17): Xaa = Any Amino Acid
CCELXXACNPAXCTXGA

SEQ ID NO: 9222 - protein, 17 aa, Artificial Sequence
  Synthetically generated peptide
  VARIANT (1)..(17): Xaa = Any Amino Acid
CCELXXACNPAXCTGXA

SEQ ID NO: 9223 - protein, 16 aa, Artificial Sequence
  Synthetically generated peptide
  VARIANT (1)..(16): Xaa = Any Amino Acid
CCELXXACNPACXTGA

SEQ ID NO: 9224 - protein, 17 aa, Artificial Sequence
  Synthetically generated peptide
  VARIANT (1)..(17): Xaa = Any Amino Acid
CCELXXACNPACXXTGA

SEQ ID NO: 9225 - protein, 17 aa, Artificial Sequence
  Synthetically generated peptide
  VARIANT (1)..(17): Xaa = Any Amino Acid
CCELXXACNPACXTXGA

SEQ ID NO: 9226 - protein, 17 aa, Artificial Sequence
  Synthetically generated peptide
  VARIANT (1)..(17): Xaa = Any Amino Acid
CCELXXACNPACXTGXA

SEQ ID NO: 9227 - protein, 16 aa, Artificial Sequence
  Synthetically generated peptide
  VARIANT (1)..(16): Xaa = Any Amino Acid
CCELXXACNPACTXGA

SEQ ID NO: 9228 - protein, 17 aa, Artificial Sequence
  Synthetically generated peptide
  VARIANT (1)..(17): Xaa = Any Amino Acid
CCELXXACNPACTXXGA

SEQ ID NO: 9229 - protein, 17 aa, Artificial Sequence
  Synthetically generated peptide
  VARIANT (1)..(17): Xaa = Any Amino Acid
CCELXXACNPACTXGXA

SEQ ID NO: 9230 - protein, 16 aa, Artificial Sequence
  Synthetically generated peptide
  VARIANT (1)..(16): Xaa = Any Amino Acid
CCELXXACNPACTGXA

SEQ ID NO: 9231 - protein, 17 aa, Artificial Sequence
  Synthetically generated peptide
  VARIANT (1)..(17): Xaa = Any Amino Acid
CCELXXACNPACTGXXA

SEQ ID NO: 9232 - protein, 15 aa, Artificial Sequence
  Synthetically generated peptide
  VARIANT (1)..(15): Xaa = Any Amino Acid
CCELXACXNPACTGA

SEQ ID NO: 9233 - protein, 16 aa, Artificial Sequence
  Synthetically generated peptide
  VARIANT (1)..(16): Xaa = Any Amino Acid
CCELXACXXNPACTGA

SEQ ID NO: 9234 - protein, 17 aa, Artificial Sequence
  Synthetically generated peptide
  VARIANT (1)..(17): Xaa = Any Amino Acid
CCELXACXXXNPACTGA

SEQ ID NO: 9235 - protein, 17 aa, Artificial Sequence
  Synthetically generated peptide
  VARIANT (1)..(17): Xaa = Any Amino Acid
CCELXACXXNXPACTGA

SEQ ID NO: 9236 - protein, 17 aa, Artificial Sequence
  Synthetically generated peptide
  VARIANT (1)..(17): Xaa = Any Amino Acid
CCELXACXXNPXACTGA

SEQ ID NO: 9237 - protein, 17 aa, Artificial Sequence
  Synthetically generated peptide
  VARIANT (1)..(17): Xaa = Any Amino Acid
CCELXACXXNPAXCTGA

SEQ ID NO: 9238 - protein, 17 aa, Artificial Sequence
  Synthetically generated peptide
  VARIANT (1)..(17): Xaa = Any Amino Acid
CCELXACXXNPACXTGA

SEQ ID NO: 9239 - protein, 17 aa, Artificial Sequence
  Synthetically generated peptide
  VARIANT (1)..(17): Xaa = Any Amino Acid
CCELXACXXNPACTXGA

SEQ ID NO: 9240 - protein, 17 aa, Artificial Sequence
  Synthetically generated peptide
  VARIANT (1)..(17): Xaa = Any Amino Acid
CCELXACXXNPACTGXA

SEQ ID NO: 9241 - protein, 16 aa, Artificial Sequence
  Synthetically generated peptide
  VARIANT (1)..(16): Xaa = Any Amino Acid
CCELXACXNXPACTGA

SEQ ID NO: 9242 - protein, 17 aa, Artificial Sequence
  Synthetically generated peptide
  VARIANT (1)..(17): Xaa = Any Amino Acid
CCELXACXNXXPACTGA

SEQ ID NO: 9243 - protein, 17 aa, Artificial Sequence
  Synthetically generated peptide
  VARIANT (1)..(17): Xaa = Any Amino Acid
CCELXACXNXPXACTGA

SEQ ID NO: 9244 - protein, 17 aa, Artificial Sequence
  Synthetically generated peptide
  VARIANT (1)..(17): Xaa = Any Amino Acid
CCELXACXNXPAXCTGA

SEQ ID NO: 9245 - protein, 17 aa, Artificial Sequence
  Synthetically generated peptide
  VARIANT (1)..(17): Xaa = Any Amino Acid
CCELXACXNXPACXTGA

SEQ ID NO: 9246 - protein, 17 aa, Artificial Sequence
  Synthetically generated peptide
  VARIANT (1)..(17): Xaa = Any Amino Acid
CCELXACXNXPACTXGA

SEQ ID NO: 9247 - protein, 17 aa, Artificial Sequence
  Synthetically generated peptide
  VARIANT (1)..(17): Xaa = Any Amino Acid
CCELXACXNXPACTGXA

SEQ ID NO: 9248 - protein, 16 aa, Artificial Sequence
  Synthetically generated peptide
  VARIANT (1)..(16): Xaa = Any Amino Acid
CCELXACXNPXACTGA

SEQ ID NO: 9249 - protein, 17 aa, Artificial Sequence
  Synthetically generated peptide
  VARIANT (1)..(17): Xaa = Any Amino Acid
CCELXACXNPXXACTGA

SEQ ID NO: 9250 - protein, 17 aa, Artificial Sequence
  Synthetically generated peptide
  VARIANT (1)..(17): Xaa = Any Amino Acid
CCELXACXNPXAXCTGA

SEQ ID NO: 9251 - protein, 17 aa, Artificial Sequence
  Synthetically generated peptide
  VARIANT (1)..(17): Xaa = Any Amino Acid
CCELXACXNPXACXTGA

SEQ ID NO: 9252 - protein, 17 aa, Artificial Sequence
  Synthetically generated peptide
  VARIANT (1)..(17): Xaa = Any Amino Acid
CCELXACXNPXACTXGA

SEQ ID NO: 9253 - protein, 17 aa, Artificial Sequence
  Synthetically generated peptide
  VARIANT (1)..(17): Xaa = Any Amino Acid
CCELXACXNPXACTGXA

SEQ ID NO: 9254 - protein, 16 aa, Artificial Sequence
  Synthetically generated peptide
  VARIANT (1)..(16): Xaa = Any Amino Acid
CCELXACXNPAXCTGA

SEQ ID NO: 9255 - protein, 17 aa, Artificial Sequence
  Synthetically generated peptide
  VARIANT (1)..(17): Xaa = Any Amino Acid
CCELXACXNPAXXCTGA

SEQ ID NO: 9256 - protein, 17 aa, Artificial Sequence
  Synthetically generated peptide
  VARIANT (1)..(17): Xaa = Any Amino Acid
CCELXACXNPAXCXTGA

SEQ ID NO: 9257 - protein, 17 aa, Artificial Sequence
  Synthetically generated peptide
  VARIANT (1)..(17): Xaa = Any Amino Acid
CCELXACXNPAXCTXGA

SEQ ID NO: 9258 - protein, 17 aa, Artificial Sequence
  Synthetically generated peptide
  VARIANT (1)..(17): Xaa = Any Amino Acid
CCELXACXNPAXCTGXA

SEQ ID NO: 9259 - protein, 16 aa, Artificial Sequence
  Synthetically generated peptide
  VARIANT (1)..(16): Xaa = Any Amino Acid
CCELXACXNPACXTGA

SEQ ID NO: 9260 - protein, 17 aa, Artificial Sequence
  Synthetically generated peptide
  VARIANT (1)..(17): Xaa = Any Amino Acid
CCELXACXNPACXXTGA

SEQ ID NO: 9261 - protein, 17 aa, Artificial Sequence
  Synthetically generated peptide
  VARIANT (1)..(17): Xaa = Any Amino Acid
CCELXACXNPACXTXGA

SEQ ID NO: 9262 - protein, 17 aa, Artificial Sequence
  Synthetically generated peptide
  VARIANT (1)..(17): Xaa = Any Amino Acid
CCELXACXNPACXTGXA

SEQ ID NO: 9263 - protein, 16 aa, Artificial Sequence
  Synthetically generated peptide
  VARIANT (1)..(16): Xaa = Any Amino Acid
CCELXACXNPACTXGA

SEQ ID NO: 9264 - protein, 17 aa, Artificial Sequence
  Synthetically generated peptide
  VARIANT (1)..(17): Xaa = Any Amino Acid
CCELXACXNPACTXXGA

SEQ ID NO: 9265 - protein, 17 aa, Artificial Sequence
  Synthetically generated peptide
  VARIANT (1)..(17): Xaa = Any Amino Acid
CCELXACXNPACTXGXA

SEQ ID NO: 9266 - protein, 16 aa, Artificial Sequence
  Synthetically generated peptide
  VARIANT (1)..(16): Xaa = Any Amino Acid
CCELXACXNPACTGXA

SEQ ID NO: 9267 - protein, 17 aa, Artificial Sequence
  Synthetically generated peptide
  VARIANT (1)..(17): Xaa = Any Amino Acid
CCELXACXNPACTGXXA

SEQ ID NO: 9268 - protein, 15 aa, Artificial Sequence
  Synthetically generated peptide
  VARIANT (1)..(15): Xaa = Any Amino Acid
CCELXACNXPACTGA

SEQ ID NO: 9269 - protein, 16 aa, Artificial Sequence
  Synthetically generated peptide
  VARIANT (1)..(16): Xaa = Any Amino Acid
CCELXACNXXPACTGA

SEQ ID NO: 9270 - protein, 17 aa, Artificial Sequence
  Synthetically generated peptide
  VARIANT (1)..(17): Xaa = Any Amino Acid
CCELXACNXXXPACTGA

SEQ ID NO: 9271 - protein, 17 aa, Artificial Sequence
  Synthetically generated peptide
  VARIANT (1)..(17): Xaa = Any Amino Acid
CCELXACNXXPXACTGA

SEQ ID NO: 9272 - protein, 17 aa, Artificial Sequence
  Synthetically generated peptide
  VARIANT (1)..(17): Xaa = Any Amino Acid
CCELXACNXXPAXCTGA

SEQ ID NO: 9273 - protein, 17 aa, Artificial Sequence
  Synthetically generated peptide
  VARIANT (1)..(17): Xaa = Any Amino Acid
CCELXACNXXPACXTGA

SEQ ID NO: 9274 - protein, 17 aa, Artificial Sequence
  Synthetically generated peptide
  VARIANT (1)..(17): Xaa = Any Amino Acid
CCELXACNXXPACTXGA

SEQ ID NO: 9275 - protein, 17 aa, Artificial Sequence
  Synthetically generated peptide
  VARIANT (1)..(17): Xaa = Any Amino Acid
CCELXACNXXPACTGXA

SEQ ID NO: 9276 - protein, 16 aa, Artificial Sequence
  Synthetically generated peptide
  VARIANT (1)..(16): Xaa = Any Amino Acid
CCELXACNXPXACTGA

SEQ ID NO: 9277 - protein, 17 aa, Artificial Sequence
  Synthetically generated peptide
  VARIANT (1)..(17): Xaa = Any Amino Acid
CCELXACNXPXXACTGA

SEQ ID NO: 9278 - protein, 17 aa, Artificial Sequence
  Synthetically generated peptide
  VARIANT (1)..(17): Xaa = Any Amino Acid
CCELXACNXPXAXCTGA

SEQ ID NO: 9279 - protein, 17 aa, Artificial Sequence
  Synthetically generated peptide
  VARIANT (1)..(17): Xaa = Any Amino Acid
CCELXACNXPXACXTGA

SEQ ID NO: 9280 - protein, 17 aa, Artificial Sequence
  Synthetically generated peptide
  VARIANT (1)..(17): Xaa = Any Amino Acid
CCELXACNXPXACTXGA

SEQ ID NO: 9281 - protein, 17 aa, Artificial Sequence
  Synthetically generated peptide
  VARIANT (1)..(17): Xaa = Any Amino Acid
CCELXACNXPXACTGXA

SEQ ID NO: 9282 - protein, 16 aa, Artificial Sequence
  Synthetically generated peptide
  VARIANT (1)..(16): Xaa = Any Amino Acid
CCELXACNXPAXCTGA

SEQ ID NO: 9283 - protein, 17 aa, Artificial Sequence
  Synthetically generated peptide
  VARIANT (1)..(17): Xaa = Any Amino Acid
CCELXACNXPAXXCTGA

SEQ ID NO: 9284 - protein, 17 aa, Artificial Sequence
  Synthetically generated peptide
  VARIANT (1)..(17): Xaa = Any Amino Acid
CCELXACNXPAXCXTGA

SEQ ID NO: 9285 - protein, 17 aa, Artificial Sequence
  Synthetically generated peptide
  VARIANT (1)..(17): Xaa = Any Amino Acid
CCELXACNXPAXCTXGA

SEQ ID NO: 9286 - protein, 17 aa, Artificial Sequence
  Synthetically generated peptide
  VARIANT (1)..(17): Xaa = Any Amino Acid
CCELXACNXPAXCTGXA

SEQ ID NO: 9287 - protein, 16 aa, Artificial Sequence
  Synthetically generated peptide
  VARIANT (1)..(16): Xaa = Any Amino Acid
CCELXACNXPACXTGA

SEQ ID NO: 9288 - protein, 17 aa, Artificial Sequence
  Synthetically generated peptide
  VARIANT (1)..(17): Xaa = Any Amino Acid
CCELXACNXPACXXTGA

SEQ ID NO: 9289 - protein, 17 aa, Artificial Sequence
  Synthetically generated peptide
  VARIANT (1)..(17): Xaa = Any Amino Acid
CCELXACNXPACXTXGA

SEQ ID NO: 9290 - protein, 17 aa, Artificial Sequence
  Synthetically generated peptide
  VARIANT (1)..(17): Xaa = Any Amino Acid
CCELXACNXPACXTGXA

SEQ ID NO: 9291 - protein, 16 aa, Artificial Sequence
  Synthetically generated peptide
  VARIANT (1)..(16): Xaa = Any Amino Acid
CCELXACNXPACTXGA

SEQ ID NO: 9292 - protein, 17 aa, Artificial Sequence
  Synthetically generated peptide
  VARIANT (1)..(17): Xaa = Any Amino Acid
CCELXACNXPACTXXGA

SEQ ID NO: 9293 - protein, 17 aa, Artificial Sequence
  Synthetically generated peptide
  VARIANT (1)..(17): Xaa = Any Amino Acid
CCELXACNXPACTXGXA

SEQ ID NO: 9294 - protein, 16 aa, Artificial Sequence
  Synthetically generated peptide
  VARIANT (1)..(16): Xaa = Any Amino Acid
CCELXACNXPACTGXA

SEQ ID NO: 9295 - protein, 17 aa, Artificial Sequence
  Synthetically generated peptide
  VARIANT (1)..(17): Xaa = Any Amino Acid
CCELXACNXPACTGXXA

SEQ ID NO: 9296 - protein, 15 aa, Artificial Sequence
  Synthetically generated peptide
  VARIANT (1)..(15): Xaa = Any Amino Acid
CCELXACNPXACTGA

SEQ ID NO: 9297 - protein, 16 aa, Artificial Sequence
  Synthetically generated peptide
  VARIANT (1)..(16): Xaa = Any Amino Acid
CCELXACNPXXACTGA

SEQ ID NO: 9298 - protein, 17 aa, Artificial Sequence
  Synthetically generated peptide
  VARIANT (1)..(17): Xaa = Any Amino Acid
CCELXACNPXXXACTGA

SEQ ID NO: 9299 - protein, 17 aa, Artificial Sequence
  Synthetically generated peptide
  VARIANT (1)..(17): Xaa = Any Amino Acid
CCELXACNPXXAXCTGA

SEQ ID NO: 9300 - protein, 17 aa, Artificial Sequence
  Synthetically generated peptide
  VARIANT (1)..(17): Xaa = Any Amino Acid
CCELXACNPXXACXTGA

SEQ ID NO: 9301 - protein, 17 aa, Artificial Sequence
  Synthetically generated peptide
  VARIANT (1)..(17): Xaa = Any Amino Acid
CCELXACNPXXACTXGA

SEQ ID NO: 9302 - protein, 17 aa, Artificial Sequence
  Synthetically generated peptide
  VARIANT (1)..(17): Xaa = Any Amino Acid
CCELXACNPXXACTGXA

SEQ ID NO: 9303 - protein, 16 aa, Artificial Sequence
  Synthetically generated peptide
  VARIANT (1)..(16): Xaa = Any Amino Acid
CCELXACNPXAXCTGA

SEQ ID NO: 9304 - protein, 17 aa, Artificial Sequence
  Synthetically generated peptide
  VARIANT (1)..(17): Xaa = Any Amino Acid
CCELXACNPXAXXCTGA

SEQ ID NO: 9305 - protein, 17 aa, Artificial Sequence
  Synthetically generated peptide
  VARIANT (1)..(17): Xaa = Any Amino Acid
CCELXACNPXAXCXTGA

SEQ ID NO: 9306 - protein, 17 aa, Artificial Sequence
  Synthetically generated peptide
  VARIANT (1)..(17): Xaa = Any Amino Acid
CCELXACNPXAXCTXGA

SEQ ID NO: 9307 - protein, 17 aa, Artificial Sequence
  Synthetically generated peptide
  VARIANT (1)..(17): Xaa = Any Amino Acid
CCELXACNPXAXCTGXA

SEQ ID NO: 9308 - protein, 16 aa, Artificial Sequence
  Synthetically generated peptide
  VARIANT (1)..(16): Xaa = Any Amino Acid
CCELXACNPXACXTGA

SEQ ID NO: 9309 - protein, 17 aa, Artificial Sequence
  Synthetically generated peptide
  VARIANT (1)..(17): Xaa = Any Amino Acid
CCELXACNPXACXXTGA

SEQ ID NO: 9310 - protein, 17 aa, Artificial Sequence
  Synthetically generated peptide
  VARIANT (1)..(17): Xaa = Any Amino Acid
CCELXACNPXACXTXGA

SEQ ID NO: 9311 - protein, 17 aa, Artificial Sequence
  Synthetically generated peptide
  VARIANT (1)..(17): Xaa = Any Amino Acid
CCELXACNPXACXTGXA

SEQ ID NO: 9312 - protein, 16 aa, Artificial Sequence
  Synthetically generated peptide
  VARIANT (1)..(16): Xaa = Any Amino Acid
CCELXACNPXACTXGA

SEQ ID NO: 9313 - protein, 17 aa, Artificial Sequence
  Synthetically generated peptide
  VARIANT (1)..(17): Xaa = Any Amino Acid
CCELXACNPXACTXXGA

SEQ ID NO: 9314 - protein, 17 aa, Artificial Sequence
  Synthetically generated peptide
  VARIANT (1)..(17): Xaa = Any Amino Acid
CCELXACNPXACTXGXA

SEQ ID NO: 9315 - protein, 16 aa, Artificial Sequence
  Synthetically generated peptide
  VARIANT (1)..(16): Xaa = Any Amino Acid
CCELXACNPXACTGXA

SEQ ID NO: 9316 - protein, 17 aa, Artificial Sequence
  Synthetically generated peptide
  VARIANT (1)..(17): Xaa = Any Amino Acid
CCELXACNPXACTGXXA

SEQ ID NO: 9317 - protein, 15 aa, Artificial Sequence
  Synthetically generated peptide
  VARIANT (1)..(15): Xaa = Any Amino Acid
CCELXACNPAXCTGA

SEQ ID NO: 9318 - protein, 16 aa, Artificial Sequence
  Synthetically generated peptide
  VARIANT (1)..(16): Xaa = Any Amino Acid
CCELXACNPAXXCTGA

SEQ ID NO: 9319 - protein, 17 aa, Artificial Sequence
  Synthetically generated peptide
  VARIANT (1)..(17): Xaa = Any Amino Acid
CCELXACNPAXXXCTGA

SEQ ID NO: 9320 - protein, 17 aa, Artificial Sequence
  Synthetically generated peptide
  VARIANT (1)..(17): Xaa = Any Amino Acid
CCELXACNPAXXCXTGA

SEQ ID NO: 9321 - protein, 17 aa, Artificial Sequence
  Synthetically generated peptide
  VARIANT (1)..(17): Xaa = Any Amino Acid
CCELXACNPAXXCTXGA

SEQ ID NO: 9322 - protein, 17 aa, Artificial Sequence
  Synthetically generated peptide
  VARIANT (1)..(17): Xaa = Any Amino Acid
CCELXACNPAXXCTGXA

SEQ ID NO: 9323 - protein, 16 aa, Artificial Sequence
  Synthetically generated peptide
  VARIANT (1)..(16): Xaa = Any Amino Acid
CCELXACNPAXCXTGA

SEQ ID NO: 9324 - protein, 17 aa, Artificial Sequence
  Synthetically generated peptide
  VARIANT (1)..(17): Xaa = Any Amino Acid
CCELXACNPAXCXXTGA

SEQ ID NO: 9325 - protein, 17 aa, Artificial Sequence
  Synthetically generated peptide
  VARIANT (1)..(17): Xaa = Any Amino Acid
CCELXACNPAXCXTXGA

SEQ ID NO: 9326 - protein, 17 aa, Artificial Sequence
  Synthetically generated peptide
  VARIANT (1)..(17): Xaa = Any Amino Acid
CCELXACNPAXCXTGXA

SEQ ID NO: 9327 - protein, 16 aa, Artificial Sequence
  Synthetically generated peptide
  VARIANT (1)..(16): Xaa = Any Amino Acid
CCELXACNPAXCTXGA

SEQ ID NO: 9328 - protein, 17 aa, Artificial Sequence
  Synthetically generated peptide
  VARIANT (1)..(17): Xaa = Any Amino Acid
CCELXACNPAXCTXXGA

SEQ ID NO: 9329 - protein, 17 aa, Artificial Sequence
  Synthetically generated peptide
  VARIANT (1)..(17): Xaa = Any Amino Acid
CCELXACNPAXCTXGXA

SEQ ID NO: 9330 - protein, 16 aa, Artificial Sequence
  Synthetically generated peptide
  VARIANT (1)..(16): Xaa = Any Amino Acid
CCELXACNPAXCTGXA

SEQ ID NO: 9331 - protein, 17 aa, Artificial Sequence
  Synthetically generated peptide
  VARIANT (1)..(17): Xaa = Any Amino Acid
CCELXACNPAXCTGXXA

SEQ ID NO: 9332 - protein, 15 aa, Artificial Sequence
  Synthetically generated peptide
  VARIANT (1)..(15): Xaa = Any Amino Acid
CCELXACNPACXTGA

SEQ ID NO: 9333 - protein, 16 aa, Artificial Sequence
  Synthetically generated peptide
  VARIANT (1)..(16): Xaa = Any Amino Acid
CCELXACNPACXXTGA

SEQ ID NO: 9334 - protein, 17 aa, Artificial Sequence
  Synthetically generated peptide
  VARIANT (1)..(17): Xaa = Any Amino Acid
CCELXACNPACXXXTGA

SEQ ID NO: 9335 - protein, 17 aa, Artificial Sequence
  Synthetically generated peptide
  VARIANT (1)..(17): Xaa = Any Amino Acid
CCELXACNPACXXTXGA

SEQ ID NO: 9336 - protein, 17 aa, Artificial Sequence
  Synthetically generated peptide
  VARIANT (1)..(17): Xaa = Any Amino Acid
CCELXACNPACXXTGXA

SEQ ID NO: 9337 - protein, 16 aa, Artificial Sequence
  Synthetically generated peptide
  VARIANT (1)..(16): Xaa = Any Amino Acid
CCELXACNPACXTXGA

SEQ ID NO: 9338 - protein, 17 aa, Artificial Sequence
  Synthetically generated peptide
  VARIANT (1)..(17): Xaa = Any Amino Acid
CCELXACNPACXTXXGA

SEQ ID NO: 9339 - protein, 17 aa, Artificial Sequence
  Synthetically generated peptide
  VARIANT (1)..(17): Xaa = Any Amino Acid
CCELXACNPACXTXGXA

SEQ ID NO: 9340 - protein, 16 aa, Artificial Sequence
  Synthetically generated peptide
  VARIANT (1)..(16): Xaa = Any Amino Acid
CCELXACNPACXTGXA

SEQ ID NO: 9341 - protein, 17 aa, Artificial Sequence
  Synthetically generated peptide
  VARIANT (1)..(17): Xaa = Any Amino Acid
CCELXACNPACXTGXXA

SEQ ID NO: 9342 - protein, 15 aa, Artificial Sequence
  Synthetically generated peptide
  VARIANT (1)..(15): Xaa = Any Amino Acid
CCELXACNPACTXGA

SEQ ID NO: 9343 - protein, 16 aa, Artificial Sequence
  Synthetically generated peptide
  VARIANT (1)..(16): Xaa = Any Amino Acid
CCELXACNPACTXXGA

SEQ ID NO: 9344 - protein, 17 aa, Artificial Sequence
  Synthetically generated peptide
  VARIANT (1)..(17): Xaa = Any Amino Acid
CCELXACNPACTXXXGA

SEQ ID NO: 9345 - protein, 17 aa, Artificial Sequence
  Synthetically generated peptide
  VARIANT (1)..(17): Xaa = Any Amino Acid
CCELXACNPACTXXGXA

SEQ ID NO: 9346 - protein, 16 aa, Artificial Sequence
  Synthetically generated peptide
  VARIANT (1)..(16): Xaa = Any Amino Acid
CCELXACNPACTXGXA

SEQ ID NO: 9347 - protein, 17 aa, Artificial Sequence
  Synthetically generated peptide
  VARIANT (1)..(17): Xaa = Any Amino Acid
CCELXACNPACTXGXXA

SEQ ID NO: 9348 - protein, 15 aa, Artificial Sequence
  Synthetically generated peptide
  VARIANT (1)..(15): Xaa = Any Amino Acid
CCELXACNPACTGXA

SEQ ID NO: 9349 - protein, 16 aa, Artificial Sequence
  Synthetically generated peptide
  VARIANT (1)..(16): Xaa = Any Amino Acid
CCELXACNPACTGXXA

SEQ ID NO: 9350 - protein, 17 aa, Artificial Sequence
  Synthetically generated peptide
  VARIANT (1)..(17): Xaa = Any Amino Acid
CCELXACNPACTGXXXA

SEQ ID NO: 9351 - protein, 14 aa, Artificial Sequence
  Synthetically generated peptide
  VARIANT (1)..(14): Xaa = Any Amino Acid
CCELACXNPACTGA

SEQ ID NO: 9352 - protein, 15 aa, Artificial Sequence
  Synthetically generated peptide
  VARIANT (1)..(15): Xaa = Any Amino Acid
CCELACXXNPACTGA

SEQ ID NO: 9353 - protein, 16 aa, Artificial Sequence
  Synthetically generated peptide
  VARIANT (1)..(16): Xaa = Any Amino Acid
CCELACXXXNPACTGA

SEQ ID NO: 9354 - protein, 17 aa, Artificial Sequence
  Synthetically generated peptide
  VARIANT (1)..(17): Xaa = Any Amino Acid
CCELACXXXXNPACTGA

SEQ ID NO: 9355 - protein, 17 aa, Artificial Sequence
  Synthetically generated peptide
  VARIANT (1)..(17): Xaa = Any Amino Acid
CCELACXXXNXPACTGA

SEQ ID NO: 9356 - protein, 17 aa, Artificial Sequence
  Synthetically generated peptide
  VARIANT (1)..(17): Xaa = Any Amino Acid
CCELACXXXNPXACTGA

SEQ ID NO: 9357 - protein, 17 aa, Artificial Sequence
  Synthetically generated peptide
  VARIANT (1)..(17): Xaa = Any Amino Acid
CCELACXXXNPAXCTGA

SEQ ID NO: 9358 - protein, 17 aa, Artificial Sequence
  Synthetically generated peptide
  VARIANT (1)..(17): Xaa = Any Amino Acid
CCELACXXXNPACXTGA

SEQ ID NO: 9359 - protein, 17 aa, Artificial Sequence
  Synthetically generated peptide
  VARIANT (1)..(17): Xaa = Any Amino Acid
CCELACXXXNPACTXGA

SEQ ID NO: 9360 - protein, 17 aa, Artificial Sequence
  Synthetically generated peptide
  VARIANT (1)..(17): Xaa = Any Amino Acid
CCELACXXXNPACTGXA

SEQ ID NO: 9361 - protein, 16 aa, Artificial Sequence
  Synthetically generated peptide
  VARIANT (1)..(16): Xaa = Any Amino Acid
CCELACXXNXPACTGA

SEQ ID NO: 9362 - protein, 17 aa, Artificial Sequence
  Synthetically generated peptide
  VARIANT (1)..(17): Xaa = Any Amino Acid
CCELACXXNXXPACTGA

SEQ ID NO: 9363 - protein, 17 aa, Artificial Sequence
  Synthetically generated peptide
  VARIANT (1)..(17): Xaa = Any Amino Acid
CCELACXXNXPXACTGA

SEQ ID NO: 9364 - protein, 17 aa, Artificial Sequence
  Synthetically generated peptide
  VARIANT (1)..(17): Xaa = Any Amino Acid
CCELACXXNXPAXCTGA

SEQ ID NO: 9365 - protein, 17 aa, Artificial Sequence
  Synthetically generated peptide
  VARIANT (1)..(17): Xaa = Any Amino Acid
CCELACXXNXPACXTGA

SEQ ID NO: 9366 - protein, 17 aa, Artificial Sequence
  Synthetically generated peptide
  VARIANT (1)..(17): Xaa = Any Amino Acid
CCELACXXNXPACTXGA

SEQ ID NO: 9367 - protein, 17 aa, Artificial Sequence
  Synthetically generated peptide
  VARIANT (1)..(17): Xaa = Any Amino Acid
CCELACXXNXPACTGXA

SEQ ID NO: 9368 - protein, 16 aa, Artificial Sequence
  Synthetically generated peptide
  VARIANT (1)..(16): Xaa = Any Amino Acid
CCELACXXNPXACTGA

SEQ ID NO: 9369 - protein, 17 aa, Artificial Sequence
  Synthetically generated peptide
  VARIANT (1)..(17): Xaa = Any Amino Acid
CCELACXXNPXXACTGA

SEQ ID NO: 9370 - protein, 17 aa, Artificial Sequence
  Synthetically generated peptide
  VARIANT (1)..(17): Xaa = Any Amino Acid
CCELACXXNPXAXCTGA

SEQ ID NO: 9371 - protein, 17 aa, Artificial Sequence
  Synthetically generated peptide
  VARIANT (1)..(17): Xaa = Any Amino Acid
CCELACXXNPXACXTGA

SEQ ID NO: 9372 - protein, 17 aa, Artificial Sequence
  Synthetically generated peptide
  VARIANT (1)..(17): Xaa = Any Amino Acid
CCELACXXNPXACTXGA

SEQ ID NO: 9373 - protein, 17 aa, Artificial Sequence
  Synthetically generated peptide
  VARIANT (1)..(17): Xaa = Any Amino Acid
CCELACXXNPXACTGXA

SEQ ID NO: 9374 - protein, 16 aa, Artificial Sequence
  Synthetically generated peptide
  VARIANT (1)..(16): Xaa = Any Amino Acid
CCELACXXNPAXCTGA

SEQ ID NO: 9375 - protein, 17 aa, Artificial Sequence
  Synthetically generated peptide
  VARIANT (1)..(17): Xaa = Any Amino Acid
CCELACXXNPAXXCTGA

SEQ ID NO: 9376 - protein, 17 aa, Artificial Sequence
  Synthetically generated peptide
  VARIANT (1)..(17): Xaa = Any Amino Acid
CCELACXXNPAXCXTGA

SEQ ID NO: 9377 - protein, 17 aa, Artificial Sequence
  Synthetically generated peptide
  VARIANT (1)..(17): Xaa = Any Amino Acid
CCELACXXNPAXCTXGA

SEQ ID NO: 9378 - protein, 17 aa, Artificial Sequence
  Synthetically generated peptide
  VARIANT (1)..(17): Xaa = Any Amino Acid
CCELACXXNPAXCTGXA

SEQ ID NO: 9379 - protein, 16 aa, Artificial Sequence
  Synthetically generated peptide
  VARIANT (1)..(16): Xaa = Any Amino Acid
CCELACXXNPACXTGA

SEQ ID NO: 9380 - protein, 17 aa, Artificial Sequence
  Synthetically generated peptide
  VARIANT (1)..(17): Xaa = Any Amino Acid
CCELACXXNPACXXTGA

SEQ ID NO: 9381 - protein, 17 aa, Artificial Sequence
  Synthetically generated peptide
  VARIANT (1)..(17): Xaa = Any Amino Acid
CCELACXXNPACXTXGA

SEQ ID NO: 9382 - protein, 17 aa, Artificial Sequence
  Synthetically generated peptide
  VARIANT (1)..(17): Xaa = Any Amino Acid
CCELACXXNPACXTGXA

SEQ ID NO: 9383 - protein, 16 aa, Artificial Sequence
  Synthetically generated peptide
  VARIANT (1)..(16): Xaa = Any Amino Acid
CCELACXXNPACTXGA

SEQ ID NO: 9384 - protein, 17 aa, Artificial Sequence
  Synthetically generated peptide
  VARIANT (1)..(17): Xaa = Any Amino Acid
CCELACXXNPACTXXGA

SEQ ID NO: 9385 - protein, 17 aa, Artificial Sequence
  Synthetically generated peptide
  VARIANT (1)..(17): Xaa = Any Amino Acid
CCELACXXNPACTXGXA

SEQ ID NO: 9386 - protein, 16 aa, Artificial Sequence
  Synthetically generated peptide
  VARIANT (1)..(16): Xaa = Any Amino Acid
CCELACXXNPACTGXA

SEQ ID NO: 9387 - protein, 17 aa, Artificial Sequence
  Synthetically generated peptide
  VARIANT (1)..(17): Xaa = Any Amino Acid
CCELACXXNPACTGXXA

SEQ ID NO: 9388 - protein, 15 aa, Artificial Sequence
  Synthetically generated peptide
  VARIANT (1)..(15): Xaa = Any Amino Acid
CCELACXNXPACTGA

SEQ ID NO: 9389 - protein, 16 aa, Artificial Sequence
  Synthetically generated peptide
  VARIANT (1)..(16): Xaa = Any Amino Acid
CCELACXNXXPACTGA

SEQ ID NO: 9390 - protein, 17 aa, Artificial Sequence
  Synthetically generated peptide
  VARIANT (1)..(17): Xaa = Any Amino Acid
CCELACXNXXXPACTGA

SEQ ID NO: 9391 - protein, 17 aa, Artificial Sequence
  Synthetically generated peptide
  VARIANT (1)..(17): Xaa = Any Amino Acid
CCELACXNXXPXACTGA

SEQ ID NO: 9392 - protein, 17 aa, Artificial Sequence
  Synthetically generated peptide
  VARIANT (1)..(17): Xaa = Any Amino Acid
CCELACXNXXPAXCTGA

SEQ ID NO: 9393 - protein, 17 aa, Artificial Sequence
  Synthetically generated peptide
  VARIANT (1)..(17): Xaa = Any Amino Acid
CCELACXNXXPACXTGA

SEQ ID NO: 9394 - protein, 17 aa, Artificial Sequence
  Synthetically generated peptide
  VARIANT (1)..(17): Xaa = Any Amino Acid
CCELACXNXXPACTXGA

SEQ ID NO: 9395 - protein, 17 aa, Artificial Sequence
  Synthetically generated peptide
  VARIANT (1)..(17): Xaa = Any Amino Acid
CCELACXNXXPACTGXA

SEQ ID NO: 9396 - protein, 16 aa, Artificial Sequence
  Synthetically generated peptide
  VARIANT (1)..(16): Xaa = Any Amino Acid
CCELACXNXPXACTGA

SEQ ID NO: 9397 - protein, 17 aa, Artificial Sequence
  Synthetically generated peptide
  VARIANT (1)..(17): Xaa = Any Amino Acid
CCELACXNXPXXACTGA

SEQ ID NO: 9398 - protein, 17 aa, Artificial Sequence
  Synthetically generated peptide
  VARIANT (1)..(17): Xaa = Any Amino Acid
CCELACXNXPXAXCTGA

SEQ ID NO: 9399 - protein, 17 aa, Artificial Sequence
  Synthetically generated peptide
  VARIANT (1)..(17): Xaa = Any Amino Acid
CCELACXNXPXACXTGA

SEQ ID NO: 9400 - protein, 17 aa, Artificial Sequence
  Synthetically generated peptide
  VARIANT (1)..(17): Xaa = Any Amino Acid
CCELACXNXPXACTXGA

SEQ ID NO: 9401 - protein, 17 aa, Artificial Sequence
  Synthetically generated peptide
  VARIANT (1)..(17): Xaa = Any Amino Acid
CCELACXNXPXACTGXA

SEQ ID NO: 9402 - protein, 16 aa, Artificial Sequence
  Synthetically generated peptide
  VARIANT (1)..(16): Xaa = Any Amino Acid
CCELACXNXPAXCTGA

SEQ ID NO: 9403 - protein, 17 aa, Artificial Sequence
  Synthetically generated peptide
  VARIANT (1)..(17): Xaa = Any Amino Acid
CCELACXNXPAXXCTGA

SEQ ID NO: 9404 - protein, 17 aa, Artificial Sequence
  Synthetically generated peptide
  VARIANT (1)..(17): Xaa = Any Amino Acid
CCELACXNXPAXCXTGA

SEQ ID NO: 9405 - protein, 17 aa, Artificial Sequence
  Synthetically generated peptide
  VARIANT (1)..(17): Xaa = Any Amino Acid
CCELACXNXPAXCTXGA

SEQ ID NO: 9406 - protein, 17 aa, Artificial Sequence
  Synthetically generated peptide
  VARIANT (1)..(17): Xaa = Any Amino Acid
CCELACXNXPAXCTGXA

SEQ ID NO: 9407 - protein, 16 aa, Artificial Sequence
  Synthetically generated peptide
  VARIANT (1)..(16): Xaa = Any Amino Acid
CCELACXNXPACXTGA

SEQ ID NO: 9408 - protein, 17 aa, Artificial Sequence
  Synthetically generated peptide
  VARIANT (1)..(17): Xaa = Any Amino Acid
CCELACXNXPACXXTGA

SEQ ID NO: 9409 - protein, 17 aa, Artificial Sequence
  Synthetically generated peptide
  VARIANT (1)..(17): Xaa = Any Amino Acid
CCELACXNXPACXTXGA

SEQ ID NO: 9410 - protein, 17 aa, Artificial Sequence
  Synthetically generated peptide
  VARIANT (1)..(17): Xaa = Any Amino Acid
CCELACXNXPACXTGXA

SEQ ID NO: 9411 - protein, 16 aa, Artificial Sequence
  Synthetically generated peptide
  VARIANT (1)..(16): Xaa = Any Amino Acid
CCELACXNXPACTXGA

SEQ ID NO: 9412 - protein, 17 aa, Artificial Sequence
  Synthetically generated peptide
  VARIANT (1)..(17): Xaa = Any Amino Acid
CCELACXNXPACTXXGA

SEQ ID NO: 9413 - protein, 17 aa, Artificial Sequence
  Synthetically generated peptide
  VARIANT (1)..(17): Xaa = Any Amino Acid
CCELACXNXPACTXGXA

SEQ ID NO: 9414 - protein, 16 aa, Artificial Sequence
  Synthetically generated peptide
  VARIANT (1)..(16): Xaa = Any Amino Acid
CCELACXNXPACTGXA

SEQ ID NO: 9415 - protein, 17 aa, Artificial Sequence
  Synthetically generated peptide
  VARIANT (1)..(17): Xaa = Any Amino Acid
CCELACXNXPACTGXXA

SEQ ID NO: 9416 - protein, 15 aa, Artificial Sequence
  Synthetically generated peptide
  VARIANT (1)..(15): Xaa = Any Amino Acid
CCELACXNPXACTGA

SEQ ID NO: 9417 - protein, 16 aa, Artificial Sequence
  Synthetically generated peptide
  VARIANT (1)..(16): Xaa = Any Amino Acid
CCELACXNPXXACTGA

SEQ ID NO: 9418 - protein, 17 aa, Artificial Sequence
  Synthetically generated peptide
  VARIANT (1)..(17): Xaa = Any Amino Acid
CCELACXNPXXXACTGA

SEQ ID NO: 9419 - protein, 17 aa, Artificial Sequence
  Synthetically generated peptide
  VARIANT (1)..(17): Xaa = Any Amino Acid
CCELACXNPXXAXCTGA

SEQ ID NO: 9420 - protein, 17 aa, Artificial Sequence
  Synthetically generated peptide
  VARIANT (1)..(17): Xaa = Any Amino Acid
CCELACXNPXXACXTGA

SEQ ID NO: 9421 - protein, 17 aa, Artificial Sequence
  Synthetically generated peptide
  VARIANT (1)..(17): Xaa = Any Amino Acid
CCELACXNPXXACTXGA

SEQ ID NO: 9422 - protein, 17 aa, Artificial Sequence
  Synthetically generated peptide
  VARIANT (1)..(17): Xaa = Any Amino Acid
CCELACXNPXXACTGXA

SEQ ID NO: 9423 - protein, 16 aa, Artificial Sequence
  Synthetically generated peptide
  VARIANT (1)..(16): Xaa = Any Amino Acid
CCELACXNPXAXCTGA

SEQ ID NO: 9424 - protein, 17 aa, Artificial Sequence
  Synthetically generated peptide
  VARIANT (1)..(17): Xaa = Any Amino Acid
CCELACXNPXAXXCTGA

SEQ ID NO: 9425 - protein, 17 aa, Artificial Sequence
  Synthetically generated peptide
  VARIANT (1)..(17): Xaa = Any Amino Acid
CCELACXNPXAXCXTGA

SEQ ID NO: 9426 - protein, 17 aa, Artificial Sequence
  Synthetically generated peptide
  VARIANT (1)..(17): Xaa = Any Amino Acid
CCELACXNPXAXCTXGA

SEQ ID NO: 9427 - protein, 17 aa, Artificial Sequence
  Synthetically generated peptide
  VARIANT (1)..(17): Xaa = Any Amino Acid
CCELACXNPXAXCTGXA

SEQ ID NO: 9428 - protein, 16 aa, Artificial Sequence
  Synthetically generated peptide
  VARIANT (1)..(16): Xaa = Any Amino Acid
CCELACXNPXACXTGA

SEQ ID NO: 9429 - protein, 17 aa, Artificial Sequence
  Synthetically generated peptide
  VARIANT (1)..(17): Xaa = Any Amino Acid
CCELACXNPXACXXTGA

SEQ ID NO: 9430 - protein, 17 aa, Artificial Sequence
  Synthetically generated peptide
  VARIANT (1)..(17): Xaa = Any Amino Acid
CCELACXNPXACXTXGA

SEQ ID NO: 9431 - protein, 17 aa, Artificial Sequence
  Synthetically generated peptide
  VARIANT (1)..(17): Xaa = Any Amino Acid
CCELACXNPXACXTGXA

SEQ ID NO: 9432 - protein, 16 aa, Artificial Sequence
  Synthetically generated peptide
  VARIANT (1)..(16): Xaa = Any Amino Acid
CCELACXNPXACTXGA

SEQ ID NO: 9433 - protein, 17 aa, Artificial Sequence
  Synthetically generated peptide
  VARIANT (1)..(17): Xaa = Any Amino Acid
CCELACXNPXACTXXGA

SEQ ID NO: 9434 - protein, 17 aa, Artificial Sequence
  Synthetically generated peptide
  VARIANT (1)..(17): Xaa = Any Amino Acid
CCELACXNPXACTXGXA

SEQ ID NO: 9435 - protein, 16 aa, Artificial Sequence
  Synthetically generated peptide
  VARIANT (1)..(16): Xaa = Any Amino Acid
CCELACXNPXACTGXA

SEQ ID NO: 9436 - protein, 17 aa, Artificial Sequence
  Synthetically generated peptide
  VARIANT (1)..(17): Xaa = Any Amino Acid
CCELACXNPXACTGXXA

SEQ ID NO: 9437 - protein, 15 aa, Artificial Sequence
  Synthetically generated peptide
  VARIANT (1)..(15): Xaa = Any Amino Acid
CCELACXNPAXCTGA

SEQ ID NO: 9438 - protein, 16 aa, Artificial Sequence
  Synthetically generated peptide
  VARIANT (1)..(16): Xaa = Any Amino Acid
CCELACXNPAXXCTGA

SEQ ID NO: 9439 - protein, 17 aa, Artificial Sequence
  Synthetically generated peptide
  VARIANT (1)..(17): Xaa = Any Amino Acid
CCELACXNPAXXXCTGA

SEQ ID NO: 9440 - protein, 17 aa, Artificial Sequence
  Synthetically generated peptide
  VARIANT (1)..(17): Xaa = Any Amino Acid
CCELACXNPAXXCXTGA

SEQ ID NO: 9441 - protein, 17 aa, Artificial Sequence
  Synthetically generated peptide
  VARIANT (1)..(17): Xaa = Any Amino Acid
CCELACXNPAXXCTXGA

SEQ ID NO: 9442 - protein, 17 aa, Artificial Sequence
  Synthetically generated peptide
  VARIANT (1)..(17): Xaa = Any Amino Acid
CCELACXNPAXXCTGXA

SEQ ID NO: 9443 - protein, 16 aa, Artificial Sequence
  Synthetically generated peptide
  VARIANT (1)..(16): Xaa = Any Amino Acid
CCELACXNPAXCXTGA

SEQ ID NO: 9444 - protein, 17 aa, Artificial Sequence
  Synthetically generated peptide
  VARIANT (1)..(17): Xaa = Any Amino Acid
CCELACXNPAXCXXTGA

SEQ ID NO: 9445 - protein, 17 aa, Artificial Sequence
  Synthetically generated peptide
  VARIANT (1)..(17): Xaa = Any Amino Acid
CCELACXNPAXCXTXGA

SEQ ID NO: 9446 - protein, 17 aa, Artificial Sequence
  Synthetically generated peptide
  VARIANT (1)..(17): Xaa = Any Amino Acid
CCELACXNPAXCXTGXA

SEQ ID NO: 9447 - protein, 16 aa, Artificial Sequence
  Synthetically generated peptide
  VARIANT (1)..(16): Xaa = Any Amino Acid
CCELACXNPAXCTXGA

SEQ ID NO: 9448 - protein, 17 aa, Artificial Sequence
  Synthetically generated peptide
  VARIANT (1)..(17): Xaa = Any Amino Acid
CCELACXNPAXCTXXGA

SEQ ID NO: 9449 - protein, 17 aa, Artificial Sequence
  Synthetically generated peptide
  VARIANT (1)..(17): Xaa = Any Amino Acid
CCELACXNPAXCTXGXA

SEQ ID NO: 9450 - protein, 16 aa, Artificial Sequence
  Synthetically generated peptide
  VARIANT (1)..(16): Xaa = Any Amino Acid
CCELACXNPAXCTGXA

SEQ ID NO: 9451 - protein, 17 aa, Artificial Sequence
  Synthetically generated peptide
  VARIANT (1)..(17): Xaa = Any Amino Acid
CCELACXNPAXCTGXXA

SEQ ID NO: 9452 - protein, 15 aa, Artificial Sequence
  Synthetically generated peptide
  VARIANT (1)..(15): Xaa = Any Amino Acid
CCELACXNPACXTGA

SEQ ID NO: 9453 - protein, 16 aa, Artificial Sequence
  Synthetically generated peptide
  VARIANT (1)..(16): Xaa = Any Amino Acid
CCELACXNPACXXTGA

SEQ ID NO: 9454 - protein, 17 aa, Artificial Sequence
  Synthetically generated peptide
  VARIANT (1)..(17): Xaa = Any Amino Acid
CCELACXNPACXXXTGA

SEQ ID NO: 9455 - protein, 17 aa, Artificial Sequence
  Synthetically generated peptide
  VARIANT (1)..(17): Xaa = Any Amino Acid
CCELACXNPACXXTXGA

SEQ ID NO: 9456 - protein, 17 aa, Artificial Sequence
  Synthetically generated peptide
  VARIANT (1)..(17): Xaa = Any Amino Acid
CCELACXNPACXXTGXA

SEQ ID NO: 9457 - protein, 16 aa, Artificial Sequence
  Synthetically generated peptide
  VARIANT (1)..(16): Xaa = Any Amino Acid
CCELACXNPACXTXGA

SEQ ID NO: 9458 - protein, 17 aa, Artificial Sequence
  Synthetically generated peptide
  VARIANT (1)..(17): Xaa = Any Amino Acid
CCELACXNPACXTXXGA

SEQ ID NO: 9459 - protein, 17 aa, Artificial Sequence
  Synthetically generated peptide
  VARIANT (1)..(17): Xaa = Any Amino Acid
CCELACXNPACXTXGXA

SEQ ID NO: 9460 - protein, 16 aa, Artificial Sequence
  Synthetically generated peptide
  VARIANT (1)..(16): Xaa = Any Amino Acid
CCELACXNPACXTGXA

SEQ ID NO: 9461 - protein, 17 aa, Artificial Sequence
  Synthetically generated peptide
  VARIANT (1)..(17): Xaa = Any Amino Acid
CCELACXNPACXTGXXA

SEQ ID NO: 9462 - protein, 15 aa, Artificial Sequence
  Synthetically generated peptide
  VARIANT (1)..(15): Xaa = Any Amino Acid
CCELACXNPACTXGA

SEQ ID NO: 9463 - protein, 16 aa, Artificial Sequence
  Synthetically generated peptide
  VARIANT (1)..(16): Xaa = Any Amino Acid
CCELACXNPACTXXGA

SEQ ID NO: 9464 - protein, 17 aa, Artificial Sequence
  Synthetically generated peptide
  VARIANT (1)..(17): Xaa = Any Amino Acid
CCELACXNPACTXXXGA

SEQ ID NO: 9465 - protein, 17 aa, Artificial Sequence
  Synthetically generated peptide
  VARIANT (1)..(17): Xaa = Any Amino Acid
CCELACXNPACTXXGXA

SEQ ID NO: 9466 - protein, 16 aa, Artificial Sequence
  Synthetically generated peptide
  VARIANT (1)..(16): Xaa = Any Amino Acid
CCELACXNPACTXGXA

SEQ ID NO: 9467 - protein, 17 aa, Artificial Sequence
  Synthetically generated peptide
  VARIANT (1)..(17): Xaa = Any Amino Acid
CCELACXNPACTXGXXA

SEQ ID NO: 9468 - protein, 15 aa, Artificial Sequence
  Synthetically generated peptide
  VARIANT (1)..(15): Xaa = Any Amino Acid
CCELACXNPACTGXA

SEQ ID NO: 9469 - protein, 16 aa, Artificial Sequence
  Synthetically generated peptide
  VARIANT (1)..(16): Xaa = Any Amino Acid
CCELACXNPACTGXXA

SEQ ID NO: 9470 - protein, 17 aa, Artificial Sequence
  Synthetically generated peptide
  VARIANT (1)..(17): Xaa = Any Amino Acid
CCELACXNPACTGXXXA

SEQ ID NO: 9471 - protein, 14 aa, Artificial Sequence
  Synthetically generated peptide
  VARIANT (1)..(14): Xaa = Any Amino Acid
CCELACNXPACTGA

SEQ ID NO: 9472 - protein, 15 aa, Artificial Sequence
  Synthetically generated peptide
  VARIANT (1)..(15): Xaa = Any Amino Acid
CCELACNXXPACTGA

SEQ ID NO: 9473 - protein, 16 aa, Artificial Sequence
  Synthetically generated peptide
  VARIANT (1)..(16): Xaa = Any Amino Acid
CCELACNXXXPACTGA

SEQ ID NO: 9474 - protein, 17 aa, Artificial Sequence
  Synthetically generated peptide
  VARIANT (1)..(17): Xaa = Any Amino Acid
CCELACNXXXXPACTGA

SEQ ID NO: 9475 - protein, 17 aa, Artificial Sequence
  Synthetically generated peptide
  VARIANT (1)..(17): Xaa = Any Amino Acid
CCELACNXXXPXACTGA

SEQ ID NO: 9476 - protein, 17 aa, Artificial Sequence
  Synthetically generated peptide
  VARIANT (1)..(17): Xaa = Any Amino Acid
CCELACNXXXPAXCTGA

SEQ ID NO: 9477 - protein, 17 aa, Artificial Sequence
  Synthetically generated peptide
  VARIANT (1)..(17): Xaa = Any Amino Acid
CCELACNXXXPACXTGA

SEQ ID NO: 9478 - protein, 17 aa, Artificial Sequence
  Synthetically generated peptide
  VARIANT (1)..(17): Xaa = Any Amino Acid
CCELACNXXXPACTXGA

SEQ ID NO: 9479 - protein, 17 aa, Artificial Sequence
  Synthetically generated peptide
  VARIANT (1)..(17): Xaa = Any Amino Acid
CCELACNXXXPACTGXA

SEQ ID NO: 9480 - protein, 16 aa, Artificial Sequence
  Synthetically generated peptide
  VARIANT (1)..(16): Xaa = Any Amino Acid
CCELACNXXPXACTGA

SEQ ID NO: 9481 - protein, 17 aa, Artificial Sequence
  Synthetically generated peptide
  VARIANT (1)..(17): Xaa = Any Amino Acid
CCELACNXXPXXACTGA

SEQ ID NO: 9482 - protein, 17 aa, Artificial Sequence
  Synthetically generated peptide
  VARIANT (1)..(17): Xaa = Any Amino Acid
CCELACNXXPXAXCTGA

SEQ ID NO: 9483 - protein, 17 aa, Artificial Sequence
  Synthetically generated peptide
  VARIANT (1)..(17): Xaa = Any Amino Acid
CCELACNXXPXACXTGA

SEQ ID NO: 9484 - protein, 17 aa, Artificial Sequence
  Synthetically generated peptide
  VARIANT (1)..(17): Xaa = Any Amino Acid
CCELACNXXPXACTXGA

SEQ ID NO: 9485 - protein, 17 aa, Artificial Sequence
  Synthetically generated peptide
  VARIANT (1)..(17): Xaa = Any Amino Acid
CCELACNXXPXACTGXA

SEQ ID NO: 9486 - protein, 16 aa, Artificial Sequence
  Synthetically generated peptide
  VARIANT (1)..(16): Xaa = Any Amino Acid
CCELACNXXPAXCTGA

SEQ ID NO: 9487 - protein, 17 aa, Artificial Sequence
  Synthetically generated peptide
  VARIANT (1)..(17): Xaa = Any Amino Acid
CCELACNXXPAXXCTGA

SEQ ID NO: 9488 - protein, 17 aa, Artificial Sequence
  Synthetically generated peptide
  VARIANT (1)..(17): Xaa = Any Amino Acid
CCELACNXXPAXCXTGA

SEQ ID NO: 9489 - protein, 17 aa, Artificial Sequence
  Synthetically generated peptide
  VARIANT (1)..(17): Xaa = Any Amino Acid
CCELACNXXPAXCTXGA

SEQ ID NO: 9490 - protein, 17 aa, Artificial Sequence
  Synthetically generated peptide
  VARIANT (1)..(17): Xaa = Any Amino Acid
CCELACNXXPAXCTGXA

SEQ ID NO: 9491 - protein, 16 aa, Artificial Sequence
  Synthetically generated peptide
  VARIANT (1)..(16): Xaa = Any Amino Acid
CCELACNXXPACXTGA

SEQ ID NO: 9492 - protein, 17 aa, Artificial Sequence
  Synthetically generated peptide
  VARIANT (1)..(17): Xaa = Any Amino Acid
CCELACNXXPACXXTGA

SEQ ID NO: 9493 - protein, 17 aa, Artificial Sequence
  Synthetically generated peptide
  VARIANT (1)..(17): Xaa = Any Amino Acid
CCELACNXXPACXTXGA

SEQ ID NO: 9494 - protein, 17 aa, Artificial Sequence
  Synthetically generated peptide
  VARIANT (1)..(17): Xaa = Any Amino Acid
CCELACNXXPACXTGXA

SEQ ID NO: 9495 - protein, 16 aa, Artificial Sequence
  Synthetically generated peptide
  VARIANT (1)..(16): Xaa = Any Amino Acid
CCELACNXXPACTXGA

SEQ ID NO: 9496 - protein, 17 aa, Artificial Sequence
  Synthetically generated peptide
  VARIANT (1)..(17): Xaa = Any Amino Acid
CCELACNXXPACTXXGA

SEQ ID NO: 9497 - protein, 17 aa, Artificial Sequence
  Synthetically generated peptide
  VARIANT (1)..(17): Xaa = Any Amino Acid
CCELACNXXPACTXGXA

SEQ ID NO: 9498 - protein, 16 aa, Artificial Sequence
  Synthetically generated peptide
  VARIANT (1)..(16): Xaa = Any Amino Acid
CCELACNXXPACTGXA

SEQ ID NO: 9499 - protein, 17 aa, Artificial Sequence
  Synthetically generated peptide
  VARIANT (1)..(17): Xaa = Any Amino Acid
CCELACNXXPACTGXXA

SEQ ID NO: 9500 - protein, 15 aa, Artificial Sequence
  Synthetically generated peptide
  VARIANT (1)..(15): Xaa = Any Amino Acid
CCELACNXPXACTGA

SEQ ID NO: 9501 - protein, 16 aa, Artificial Sequence
  Synthetically generated peptide
  VARIANT (1)..(16): Xaa = Any Amino Acid
CCELACNXPXXACTGA

SEQ ID NO: 9502 - protein, 17 aa, Artificial Sequence
  Synthetically generated peptide
  VARIANT (1)..(17): Xaa = Any Amino Acid
CCELACNXPXXXACTGA

SEQ ID NO: 9503 - protein, 17 aa, Artificial Sequence
  Synthetically generated peptide
  VARIANT (1)..(17): Xaa = Any Amino Acid
CCELACNXPXXAXCTGA

SEQ ID NO: 9504 - protein, 17 aa, Artificial Sequence
  Synthetically generated peptide
  VARIANT (1)..(17): Xaa = Any Amino Acid
CCELACNXPXXACXTGA

SEQ ID NO: 9505 - protein, 17 aa, Artificial Sequence
  Synthetically generated peptide
  VARIANT (1)..(17): Xaa = Any Amino Acid
CCELACNXPXXACTXGA

SEQ ID NO: 9506 - protein, 17 aa, Artificial Sequence
  Synthetically generated peptide
  VARIANT (1)..(17): Xaa = Any Amino Acid
CCELACNXPXXACTGXA

SEQ ID NO: 9507 - protein, 16 aa, Artificial Sequence
  Synthetically generated peptide
  VARIANT (1)..(16): Xaa = Any Amino Acid
CCELACNXPXAXCTGA

SEQ ID NO: 9508 - protein, 17 aa, Artificial Sequence
  Synthetically generated peptide
  VARIANT (1)..(17): Xaa = Any Amino Acid
CCELACNXPXAXXCTGA

SEQ ID NO: 9509 - protein, 17 aa, Artificial Sequence
  Synthetically generated peptide
  VARIANT (1)..(17): Xaa = Any Amino Acid
CCELACNXPXAXCXTGA

SEQ ID NO: 9510 - protein, 17 aa, Artificial Sequence
  Synthetically generated peptide
  VARIANT (1)..(17): Xaa = Any Amino Acid
CCELACNXPXAXCTXGA

SEQ ID NO: 9511 - protein, 17 aa, Artificial Sequence
  Synthetically generated peptide
  VARIANT (1)..(17): Xaa = Any Amino Acid
CCELACNXPXAXCTGXA

SEQ ID NO: 9512 - protein, 16 aa, Artificial Sequence
  Synthetically generated peptide
  VARIANT (1)..(16): Xaa = Any Amino Acid
CCELACNXPXACXTGA

SEQ ID NO: 9513 - protein, 17 aa, Artificial Sequence
  Synthetically generated peptide
  VARIANT (1)..(17): Xaa = Any Amino Acid
CCELACNXPXACXXTGA

SEQ ID NO: 9514 - protein, 17 aa, Artificial Sequence
  Synthetically generated peptide
  VARIANT (1)..(17): Xaa = Any Amino Acid
CCELACNXPXACXTXGA

SEQ ID NO: 9515 - protein, 17 aa, Artificial Sequence
  Synthetically generated peptide
  VARIANT (1)..(17): Xaa = Any Amino Acid
CCELACNXPXACXTGXA

SEQ ID NO: 9516 - protein, 16 aa, Artificial Sequence
  Synthetically generated peptide
  VARIANT (1)..(16): Xaa = Any Amino Acid
CCELACNXPXACTXGA

SEQ ID NO: 9517 - protein, 17 aa, Artificial Sequence
  Synthetically generated peptide
  VARIANT (1)..(17): Xaa = Any Amino Acid
CCELACNXPXACTXXGA

SEQ ID NO: 9518 - protein, 17 aa, Artificial Sequence
  Synthetically generated peptide
  VARIANT (1)..(17): Xaa = Any Amino Acid
CCELACNXPXACTXGXA

SEQ ID NO: 9519 - protein, 16 aa, Artificial Sequence
  Synthetically generated peptide
  VARIANT (1)..(16): Xaa = Any Amino Acid
CCELACNXPXACTGXA

SEQ ID NO: 9520 - protein, 17 aa, Artificial Sequence
  Synthetically generated peptide
  VARIANT (1)..(17): Xaa = Any Amino Acid
CCELACNXPXACTGXXA

SEQ ID NO: 9521 - protein, 15 aa, Artificial Sequence
  Synthetically generated peptide
  VARIANT (1)..(15): Xaa = Any Amino Acid
CCELACNXPAXCTGA

SEQ ID NO: 9522 - protein, 16 aa, Artificial Sequence
  Synthetically generated peptide
  VARIANT (1)..(16): Xaa = Any Amino Acid
CCELACNXPAXXCTGA

SEQ ID NO: 9523 - protein, 17 aa, Artificial Sequence
  Synthetically generated peptide
  VARIANT (1)..(17): Xaa = Any Amino Acid
CCELACNXPAXXXCTGA

SEQ ID NO: 9524 - protein, 17 aa, Artificial Sequence
  Synthetically generated peptide
  VARIANT (1)..(17): Xaa = Any Amino Acid
CCELACNXPAXXCXTGA

SEQ ID NO: 9525 - protein, 17 aa, Artificial Sequence
  Synthetically generated peptide
  VARIANT (1)..(17): Xaa = Any Amino Acid
CCELACNXPAXXCTXGA

SEQ ID NO: 9526 - protein, 17 aa, Artificial Sequence
  Synthetically generated peptide
  VARIANT (1)..(17): Xaa = Any Amino Acid
CCELACNXPAXXCTGXA

SEQ ID NO: 9527 - protein, 16 aa, Artificial Sequence
  Synthetically generated peptide
  VARIANT (1)..(16): Xaa = Any Amino Acid
CCELACNXPAXCXTGA

SEQ ID NO: 9528 - protein, 17 aa, Artificial Sequence
  Synthetically generated peptide
  VARIANT (1)..(17): Xaa = Any Amino Acid
CCELACNXPAXCXXTGA

SEQ ID NO: 9529 - protein, 17 aa, Artificial Sequence
  Synthetically generated peptide
  VARIANT (1)..(17): Xaa = Any Amino Acid
CCELACNXPAXCXTXGA

SEQ ID NO: 9530 - protein, 17 aa, Artificial Sequence
  Synthetically generated peptide
  VARIANT (1)..(17): Xaa = Any Amino Acid
CCELACNXPAXCXTGXA

SEQ ID NO: 9531 - protein, 16 aa, Artificial Sequence
  Synthetically generated peptide
  VARIANT (1)..(16): Xaa = Any Amino Acid
CCELACNXPAXCTXGA

SEQ ID NO: 9532 - protein, 17 aa, Artificial Sequence
  Synthetically generated peptide
  VARIANT (1)..(17): Xaa = Any Amino Acid
CCELACNXPAXCTXXGA

SEQ ID NO: 9533 - protein, 17 aa, Artificial Sequence
  Synthetically generated peptide
  VARIANT (1)..(17): Xaa = Any Amino Acid
CCELACNXPAXCTXGXA

SEQ ID NO: 9534 - protein, 16 aa, Artificial Sequence
  Synthetically generated peptide
  VARIANT (1)..(16): Xaa = Any Amino Acid
CCELACNXPAXCTGXA

SEQ ID NO: 9535 - protein, 17 aa, Artificial Sequence
  Synthetically generated peptide
  VARIANT (1)..(17): Xaa = Any Amino Acid
CCELACNXPAXCTGXXA

SEQ ID NO: 9536 - protein, 15 aa, Artificial Sequence
  Synthetically generated peptide
  VARIANT (1)..(15): Xaa = Any Amino Acid
CCELACNXPACXTGA

SEQ ID NO: 9537 - protein, 16 aa, Artificial Sequence
  Synthetically generated peptide
  VARIANT (1)..(16): Xaa = Any Amino Acid
CCELACNXPACXXTGA

SEQ ID NO: 9538 - protein, 17 aa, Artificial Sequence
  Synthetically generated peptide
  VARIANT (1)..(17): Xaa = Any Amino Acid
CCELACNXPACXXXTGA

SEQ ID NO: 9539 - protein, 17 aa, Artificial Sequence
  Synthetically generated peptide
  VARIANT (1)..(17): Xaa = Any Amino Acid
CCELACNXPACXXTXGA

SEQ ID NO: 9540 - protein, 17 aa, Artificial Sequence
  Synthetically generated peptide
  VARIANT (1)..(17): Xaa = Any Amino Acid
CCELACNXPACXXTGXA

SEQ ID NO: 9541 - protein, 16 aa, Artificial Sequence
  Synthetically generated peptide
  VARIANT (1)..(16): Xaa = Any Amino Acid
CCELACNXPACXTXGA

SEQ ID NO: 9542 - protein, 17 aa, Artificial Sequence
  Synthetically generated peptide
  VARIANT (1)..(17): Xaa = Any Amino Acid
CCELACNXPACXTXXGA

SEQ ID NO: 9543 - protein, 17 aa, Artificial Sequence
  Synthetically generated peptide
  VARIANT (1)..(17): Xaa = Any Amino Acid
CCELACNXPACXTXGXA

SEQ ID NO: 9544 - protein, 16 aa, Artificial Sequence
  Synthetically generated peptide
  VARIANT (1)..(16): Xaa = Any Amino Acid
CCELACNXPACXTGXA

SEQ ID NO: 9545 - protein, 17 aa, Artificial Sequence
  Synthetically generated peptide
  VARIANT (1)..(17): Xaa = Any Amino Acid
CCELACNXPACXTGXXA

SEQ ID NO: 9546 - protein, 15 aa, Artificial Sequence
  Synthetically generated peptide
  VARIANT (1)..(15): Xaa = Any Amino Acid
CCELACNXPACTXGA

SEQ ID NO: 9547 - protein, 16 aa, Artificial Sequence
  Synthetically generated peptide
  VARIANT (1)..(16): Xaa = Any Amino Acid
CCELACNXPACTXXGA

SEQ ID NO: 9548 - protein, 17 aa, Artificial Sequence
  Synthetically generated peptide
  VARIANT (1)..(17): Xaa = Any Amino Acid
CCELACNXPACTXXXGA

SEQ ID NO: 9549 - protein, 17 aa, Artificial Sequence
  Synthetically generated peptide
  VARIANT (1)..(17): Xaa = Any Amino Acid
CCELACNXPACTXXGXA

SEQ ID NO: 9550 - protein, 16 aa, Artificial Sequence
  Synthetically generated peptide
  VARIANT (1)..(16): Xaa = Any Amino Acid
CCELACNXPACTXGXA

SEQ ID NO: 9551 - protein, 17 aa, Artificial Sequence
  Synthetically generated peptide
  VARIANT (1)..(17): Xaa = Any Amino Acid
CCELACNXPACTXGXXA

SEQ ID NO: 9552 - protein, 15 aa, Artificial Sequence
  Synthetically generated peptide
  VARIANT (1)..(15): Xaa = Any Amino Acid
CCELACNXPACTGXA

SEQ ID NO: 9553 - protein, 16 aa, Artificial Sequence
  Synthetically generated peptide
  VARIANT (1)..(16): Xaa = Any Amino Acid
CCELACNXPACTGXXA

SEQ ID NO: 9554 - protein, 17 aa, Artificial Sequence
  Synthetically generated peptide
  VARIANT (1)..(17): Xaa = Any Amino Acid
CCELACNXPACTGXXXA

SEQ ID NO: 9555 - protein, 14 aa, Artificial Sequence
  Synthetically generated peptide
  VARIANT (1)..(14): Xaa = Any Amino Acid
CCELACNPXACTGA

SEQ ID NO: 9556 - protein, 15 aa, Artificial Sequence
  Synthetically generated peptide
  VARIANT (1)..(15): Xaa = Any Amino Acid
CCELACNPXXACTGA

SEQ ID NO: 9557 - protein, 16 aa, Artificial Sequence
  Synthetically generated peptide
  VARIANT (1)..(16): Xaa = Any Amino Acid
CCELACNPXXXACTGA

SEQ ID NO: 9558 - protein, 17 aa, Artificial Sequence
  Synthetically generated peptide
  VARIANT (1)..(17): Xaa = Any Amino Acid
CCELACNPXXXXACTGA

SEQ ID NO: 9559 - protein, 17 aa, Artificial Sequence
  Synthetically generated peptide
  VARIANT (1)..(17): Xaa = Any Amino Acid
CCELACNPXXXAXCTGA

SEQ ID NO: 9560 - protein, 17 aa, Artificial Sequence
  Synthetically generated peptide
  VARIANT (1)..(17): Xaa = Any Amino Acid
CCELACNPXXXACXTGA

SEQ ID NO: 9561 - protein, 17 aa, Artificial Sequence
  Synthetically generated peptide
  VARIANT (1)..(17): Xaa = Any Amino Acid
CCELACNPXXXACTXGA

SEQ ID NO: 9562 - protein, 17 aa, Artificial Sequence
  Synthetically generated peptide
  VARIANT (1)..(17): Xaa = Any Amino Acid
CCELACNPXXXACTGXA

SEQ ID NO: 9563 - protein, 16 aa, Artificial Sequence
  Synthetically generated peptide
  VARIANT (1)..(16): Xaa = Any Amino Acid
CCELACNPXXAXCTGA

SEQ ID NO: 9564 - protein, 17 aa, Artificial Sequence
  Synthetically generated peptide
  VARIANT (1)..(17): Xaa = Any Amino Acid
CCELACNPXXAXXCTGA

SEQ ID NO: 9565 - protein, 17 aa, Artificial Sequence
  Synthetically generated peptide
  VARIANT (1)..(17): Xaa = Any Amino Acid
CCELACNPXXAXCXTGA

SEQ ID NO: 9566 - protein, 17 aa, Artificial Sequence
  Synthetically generated peptide
  VARIANT (1)..(17): Xaa = Any Amino Acid
CCELACNPXXAXCTXGA

SEQ ID NO: 9567 - protein, 17 aa, Artificial Sequence
  Synthetically generated peptide
  VARIANT (1)..(17): Xaa = Any Amino Acid
CCELACNPXXAXCTGXA

SEQ ID NO: 9568 - protein, 16 aa, Artificial Sequence
  Synthetically generated peptide
  VARIANT (1)..(16): Xaa = Any Amino Acid
CCELACNPXXACXTGA

SEQ ID NO: 9569 - protein, 17 aa, Artificial Sequence
  Synthetically generated peptide
  VARIANT (1)..(17): Xaa = Any Amino Acid
CCELACNPXXACXXTGA

SEQ ID NO: 9570 - protein, 17 aa, Artificial Sequence
  Synthetically generated peptide
  VARIANT (1)..(17): Xaa = Any Amino Acid
CCELACNPXXACXTXGA

SEQ ID NO: 9571 - protein, 17 aa, Artificial Sequence
  Synthetically generated peptide
  VARIANT (1)..(17): Xaa = Any Amino Acid
CCELACNPXXACXTGXA

SEQ ID NO: 9572 - protein, 16 aa, Artificial Sequence
  Synthetically generated peptide
  VARIANT (1)..(16): Xaa = Any Amino Acid
CCELACNPXXACTXGA

SEQ ID NO: 9573 - protein, 17 aa, Artificial Sequence
  Synthetically generated peptide
  VARIANT (1)..(17): Xaa = Any Amino Acid
CCELACNPXXACTXXGA

SEQ ID NO: 9574 - protein, 17 aa, Artificial Sequence
  Synthetically generated peptide
  VARIANT (1)..(17): Xaa = Any Amino Acid
CCELACNPXXACTXGXA

SEQ ID NO: 9575 - protein, 16 aa, Artificial Sequence
  Synthetically generated peptide
  VARIANT (1)..(16): Xaa = Any Amino Acid
CCELACNPXXACTGXA

SEQ ID NO: 9576 - protein, 17 aa, Artificial Sequence
  Synthetically generated peptide
  VARIANT (1)..(17): Xaa = Any Amino Acid
CCELACNPXXACTGXXA

SEQ ID NO: 9577 - protein, 15 aa, Artificial Sequence
  Synthetically generated peptide
  VARIANT (1)..(15): Xaa = Any Amino Acid
CCELACNPXAXCTGA

SEQ ID NO: 9578 - protein, 16 aa, Artificial Sequence
  Synthetically generated peptide
  VARIANT (1)..(16): Xaa = Any Amino Acid
CCELACNPXAXXCTGA

SEQ ID NO: 9579 - protein, 17 aa, Artificial Sequence
  Synthetically generated peptide
  VARIANT (1)..(17): Xaa = Any Amino Acid
CCELACNPXAXXXCTGA

SEQ ID NO: 9580 - protein, 17 aa, Artificial Sequence
  Synthetically generated peptide
  VARIANT (1)..(17): Xaa = Any Amino Acid
CCELACNPXAXXCXTGA

SEQ ID NO: 9581 - protein, 17 aa, Artificial Sequence
  Synthetically generated peptide
  VARIANT (1)..(17): Xaa = Any Amino Acid
CCELACNPXAXXCTXGA

SEQ ID NO: 9582 - protein, 17 aa, Artificial Sequence
  Synthetically generated peptide
  VARIANT (1)..(17): Xaa = Any Amino Acid
CCELACNPXAXXCTGXA

SEQ ID NO: 9583 - protein, 16 aa, Artificial Sequence
  Synthetically generated peptide
  VARIANT (1)..(16): Xaa = Any Amino Acid
CCELACNPXAXCXTGA

SEQ ID NO: 9584 - protein, 17 aa, Artificial Sequence
  Synthetically generated peptide
  VARIANT (1)..(17): Xaa = Any Amino Acid
CCELACNPXAXCXXTGA

SEQ ID NO: 9585 - protein, 17 aa, Artificial Sequence
  Synthetically generated peptide
  VARIANT (1)..(17): Xaa = Any Amino Acid
CCELACNPXAXCXTXGA

SEQ ID NO: 9586 - protein, 17 aa, Artificial Sequence
  Synthetically generated peptide
  VARIANT (1)..(17): Xaa = Any Amino Acid
CCELACNPXAXCXTGXA

SEQ ID NO: 9587 - protein, 16 aa, Artificial Sequence
  Synthetically generated peptide
  VARIANT (1)..(16): Xaa = Any Amino Acid
CCELACNPXAXCTXGA

SEQ ID NO: 9588 - protein, 17 aa, Artificial Sequence
  Synthetically generated peptide
  VARIANT (1)..(17): Xaa = Any Amino Acid
CCELACNPXAXCTXXGA

SEQ ID NO: 9589 - protein, 17 aa, Artificial Sequence
  Synthetically generated peptide
  VARIANT (1)..(17): Xaa = Any Amino Acid
CCELACNPXAXCTXGXA

SEQ ID NO: 9590 - protein, 16 aa, Artificial Sequence
  Synthetically generated peptide
  VARIANT (1)..(16): Xaa = Any Amino Acid
CCELACNPXAXCTGXA

SEQ ID NO: 9591 - protein, 17 aa, Artificial Sequence
  Synthetically generated peptide
  VARIANT (1)..(17): Xaa = Any Amino Acid
CCELACNPXAXCTGXXA

SEQ ID NO: 9592 - protein, 15 aa, Artificial Sequence
  Synthetically generated peptide
  VARIANT (1)..(15): Xaa = Any Amino Acid
CCELACNPXACXTGA

SEQ ID NO: 9593 - protein, 16 aa, Artificial Sequence
  Synthetically generated peptide
  VARIANT (1)..(16): Xaa = Any Amino Acid
CCELACNPXACXXTGA

SEQ ID NO: 9594 - protein, 17 aa, Artificial Sequence
  Synthetically generated peptide
  VARIANT (1)..(17): Xaa = Any Amino Acid
CCELACNPXACXXXTGA

SEQ ID NO: 9595 - protein, 17 aa, Artificial Sequence
  Synthetically generated peptide
  VARIANT (1)..(17): Xaa = Any Amino Acid
CCELACNPXACXXTXGA

SEQ ID NO: 9596 - protein, 17 aa, Artificial Sequence
  Synthetically generated peptide
  VARIANT (1)..(17): Xaa = Any Amino Acid
CCELACNPXACXXTGXA

SEQ ID NO: 9597 - protein, 16 aa, Artificial Sequence
  Synthetically generated peptide
  VARIANT (1)..(16): Xaa = Any Amino Acid
CCELACNPXACXTXGA

SEQ ID NO: 9598 - protein, 17 aa, Artificial Sequence
  Synthetically generated peptide
  VARIANT (1)..(17): Xaa = Any Amino Acid
CCELACNPXACXTXXGA

SEQ ID NO: 9599 - protein, 17 aa, Artificial Sequence
  Synthetically generated peptide
  VARIANT (1)..(17): Xaa = Any Amino Acid
CCELACNPXACXTXGXA

SEQ ID NO: 9600 - protein, 16 aa, Artificial Sequence
  Synthetically generated peptide
  VARIANT (1)..(16): Xaa = Any Amino Acid
CCELACNPXACXTGXA

SEQ ID NO: 9601 - protein, 17 aa, Artificial Sequence
  Synthetically generated peptide
  VARIANT (1)..(17): Xaa = Any Amino Acid
CCELACNPXACXTGXXA

SEQ ID NO: 9602 - protein, 15 aa, Artificial Sequence
  Synthetically generated peptide
  VARIANT (1)..(15): Xaa = Any Amino Acid
CCELACNPXACTXGA

SEQ ID NO: 9603 - protein, 16 aa, Artificial Sequence
  Synthetically generated peptide
  VARIANT (1)..(16): Xaa = Any Amino Acid
CCELACNPXACTXXGA

SEQ ID NO: 9604 - protein, 17 aa, Artificial Sequence
  Synthetically generated peptide
  VARIANT (1)..(17): Xaa = Any Amino Acid
CCELACNPXACTXXXGA

SEQ ID NO: 9605 - protein, 17 aa, Artificial Sequence
  Synthetically generated peptide
  VARIANT (1)..(17): Xaa = Any Amino Acid
CCELACNPXACTXXGXA

SEQ ID NO: 9606 - protein, 16 aa, Artificial Sequence
  Synthetically generated peptide
  VARIANT (1)..(16): Xaa = Any Amino Acid
CCELACNPXACTXGXA

SEQ ID NO: 9607 - protein, 17 aa, Artificial Sequence
  Synthetically generated peptide
  VARIANT (1)..(17): Xaa = Any Amino Acid
CCELACNPXACTXGXXA

SEQ ID NO: 9608 - protein, 15 aa, Artificial Sequence
  Synthetically generated peptide
  VARIANT (1)..(15): Xaa = Any Amino Acid
CCELACNPXACTGXA

SEQ ID NO: 9609 - protein, 16 aa, Artificial Sequence
  Synthetically generated peptide
  VARIANT (1)..(16): Xaa = Any Amino Acid
CCELACNPXACTGXXA

SEQ ID NO: 9610 - protein, 17 aa, Artificial Sequence
  Synthetically generated peptide
  VARIANT (1)..(17): Xaa = Any Amino Acid
CCELACNPXACTGXXXA

SEQ ID NO: 9611 - protein, 14 aa, Artificial Sequence
  Synthetically generated peptide
  VARIANT (1)..(14): Xaa = Any Amino Acid
CCELACNPAXCTGA

SEQ ID NO: 9612 - protein, 15 aa, Artificial Sequence
  Synthetically generated peptide
  VARIANT (1)..(15): Xaa = Any Amino Acid
CCELACNPAXXCTGA

SEQ ID NO: 9613 - protein, 16 aa, Artificial Sequence
  Synthetically generated peptide
  VARIANT (1)..(16): Xaa = Any Amino Acid
CCELACNPAXXXCTGA

SEQ ID NO: 9614 - protein, 17 aa, Artificial Sequence
  Synthetically generated peptide
  VARIANT (1)..(17): Xaa = Any Amino Acid
CCELACNPAXXXXCTGA

SEQ ID NO: 9615 - protein, 17 aa, Artificial Sequence
  Synthetically generated peptide
  VARIANT (1)..(17): Xaa = Any Amino Acid
CCELACNPAXXXCXTGA

SEQ ID NO: 9616 - protein, 17 aa, Artificial Sequence
  Synthetically generated peptide
  VARIANT (1)..(17): Xaa = Any Amino Acid
CCELACNPAXXXCTXGA

SEQ ID NO: 9617 - protein, 17 aa, Artificial Sequence
  Synthetically generated peptide
  VARIANT (1)..(17): Xaa = Any Amino Acid
CCELACNPAXXXCTGXA

SEQ ID NO: 9618 - protein, 16 aa, Artificial Sequence
  Synthetically generated peptide
  VARIANT (1)..(16): Xaa = Any Amino Acid
CCELACNPAXXCXTGA

SEQ ID NO: 9619 - protein, 17 aa, Artificial Sequence
  Synthetically generated peptide
  VARIANT (1)..(17): Xaa = Any Amino Acid
CCELACNPAXXCXXTGA

SEQ ID NO: 9620 - protein, 17 aa, Artificial Sequence
  Synthetically generated peptide
  VARIANT (1)..(17): Xaa = Any Amino Acid
CCELACNPAXXCXTXGA

SEQ ID NO: 9621 - protein, 17 aa, Artificial Sequence
  Synthetically generated peptide
  VARIANT (1)..(17): Xaa = Any Amino Acid
CCELACNPAXXCXTGXA

SEQ ID NO: 9622 - protein, 16 aa, Artificial Sequence
  Synthetically generated peptide
  VARIANT (1)..(16): Xaa = Any Amino Acid
CCELACNPAXXCTXGA

SEQ ID NO: 9623 - protein, 17 aa, Artificial Sequence
  Synthetically generated peptide
  VARIANT (1)..(17): Xaa = Any Amino Acid
CCELACNPAXXCTXXGA

SEQ ID NO: 9624 - protein, 17 aa, Artificial Sequence
  Synthetically generated peptide
  VARIANT (1)..(17): Xaa = Any Amino Acid
CCELACNPAXXCTXGXA

SEQ ID NO: 9625 - protein, 16 aa, Artificial Sequence
  Synthetically generated peptide
  VARIANT (1)..(16): Xaa = Any Amino Acid
CCELACNPAXXCTGXA

SEQ ID NO: 9626 - protein, 17 aa, Artificial Sequence
  Synthetically generated peptide
  VARIANT (1)..(17): Xaa = Any Amino Acid
CCELACNPAXXCTGXXA

SEQ ID NO: 9627 - protein, 15 aa, Artificial Sequence
  Synthetically generated peptide
  VARIANT (1)..(15): Xaa = Any Amino Acid
CCELACNPAXCXTGA

SEQ ID NO: 9628 - protein, 16 aa, Artificial Sequence
  Synthetically generated peptide
  VARIANT (1)..(16): Xaa = Any Amino Acid
CCELACNPAXCXXTGA

SEQ ID NO: 9629 - protein, 17 aa, Artificial Sequence
  Synthetically generated peptide
  VARIANT (1)..(17): Xaa = Any Amino Acid
CCELACNPAXCXXXTGA

SEQ ID NO: 9630 - protein, 17 aa, Artificial Sequence
  Synthetically generated peptide
  VARIANT (1)..(17): Xaa = Any Amino Acid
CCELACNPAXCXXTXGA

SEQ ID NO: 9631 - protein, 17 aa, Artificial Sequence
  Synthetically generated peptide
  VARIANT (1)..(17): Xaa = Any Amino Acid
CCELACNPAXCXXTGXA

SEQ ID NO: 9632 - protein, 16 aa, Artificial Sequence
  Synthetically generated peptide
  VARIANT (1)..(16): Xaa = Any Amino Acid
CCELACNPAXCXTXGA

SEQ ID NO: 9633 - protein, 17 aa, Artificial Sequence
  Synthetically generated peptide
  VARIANT (1)..(17): Xaa = Any Amino Acid
CCELACNPAXCXTXXGA

SEQ ID NO: 9634 - protein, 17 aa, Artificial Sequence
  Synthetically generated peptide
  VARIANT (1)..(17): Xaa = Any Amino Acid
CCELACNPAXCXTXGXA

SEQ ID NO: 9635 - protein, 16 aa, Artificial Sequence
  Synthetically generated peptide
  VARIANT (1)..(16): Xaa = Any Amino Acid
CCELACNPAXCXTGXA

SEQ ID NO: 9636 - protein, 17 aa, Artificial Sequence
  Synthetically generated peptide
  VARIANT (1)..(17): Xaa = Any Amino Acid
CCELACNPAXCXTGXXA

SEQ ID NO: 9637 - protein, 15 aa, Artificial Sequence
  Synthetically generated peptide
  VARIANT (1)..(15): Xaa = Any Amino Acid
CCELACNPAXCTXGA

SEQ ID NO: 9638 - protein, 16 aa, Artificial Sequence
  Synthetically generated peptide
  VARIANT (1)..(16): Xaa = Any Amino Acid
CCELACNPAXCTXXGA

SEQ ID NO: 9639 - protein, 17 aa, Artificial Sequence
  Synthetically generated peptide
  VARIANT (1)..(17): Xaa = Any Amino Acid
CCELACNPAXCTXXXGA

SEQ ID NO: 9640 - protein, 17 aa, Artificial Sequence
  Synthetically generated peptide
  VARIANT (1)..(17): Xaa = Any Amino Acid
CCELACNPAXCTXXGXA

SEQ ID NO: 9641 - protein, 16 aa, Artificial Sequence
  Synthetically generated peptide
  VARIANT (1)..(16): Xaa = Any Amino Acid
CCELACNPAXCTXGXA

SEQ ID NO: 9642 - protein, 17 aa, Artificial Sequence
  Synthetically generated peptide
  VARIANT (1)..(17): Xaa = Any Amino Acid
CCELACNPAXCTXGXXA

SEQ ID NO: 9643 - protein, 15 aa, Artificial Sequence
  Synthetically generated peptide
  VARIANT (1)..(15): Xaa = Any Amino Acid
CCELACNPAXCTGXA

SEQ ID NO: 9644 - protein, 16 aa, Artificial Sequence
  Synthetically generated peptide
  VARIANT (1)..(16): Xaa = Any Amino Acid
CCELACNPAXCTGXXA

SEQ ID NO: 9645 - protein, 17 aa, Artificial Sequence
  Synthetically generated peptide
  VARIANT (1)..(17): Xaa = Any Amino Acid
CCELACNPAXCTGXXXA

SEQ ID NO: 9646 - protein, 14 aa, Artificial Sequence
  Synthetically generated peptide
  VARIANT (1)..(14): Xaa = Any Amino Acid
CCELACNPACXTGA

SEQ ID NO: 9647 - protein, 15 aa, Artificial Sequence
  Synthetically generated peptide
  VARIANT (1)..(15): Xaa = Any Amino Acid
CCELACNPACXXTGA

SEQ ID NO: 9648 - protein, 16 aa, Artificial Sequence
  Synthetically generated peptide
  VARIANT (1)..(16): Xaa = Any Amino Acid
CCELACNPACXXXTGA

SEQ ID NO: 9649 - protein, 17 aa, Artificial Sequence
  Synthetically generated peptide
  VARIANT (1)..(17): Xaa = Any Amino Acid
CCELACNPACXXXXTGA

SEQ ID NO: 9650 - protein, 17 aa, Artificial Sequence
  Synthetically generated peptide
  VARIANT (1)..(17): Xaa = Any Amino Acid
CCELACNPACXXXTXGA

SEQ ID NO: 9651 - protein, 17 aa, Artificial Sequence
  Synthetically generated peptide
  VARIANT (1)..(17): Xaa = Any Amino Acid
CCELACNPACXXXTGXA

SEQ ID NO: 9652 - protein, 16 aa, Artificial Sequence
  Synthetically generated peptide
  VARIANT (1)..(16): Xaa = Any Amino Acid
CCELACNPACXXTXGA

SEQ ID NO: 9653 - protein, 17 aa, Artificial Sequence
  Synthetically generated peptide
  VARIANT (1)..(17): Xaa = Any Amino Acid
CCELACNPACXXTXXGA

SEQ ID NO: 9654 - protein, 17 aa, Artificial Sequence
  Synthetically generated peptide
  VARIANT (1)..(17): Xaa = Any Amino Acid
CCELACNPACXXTXGXA

SEQ ID NO: 9655 - protein, 16 aa, Artificial Sequence
  Synthetically generated peptide
  VARIANT (1)..(16): Xaa = Any Amino Acid
CCELACNPACXXTGXA

SEQ ID NO: 9656 - protein, 17 aa, Artificial Sequence
  Synthetically generated peptide
  VARIANT (1)..(17): Xaa = Any Amino Acid
CCELACNPACXXTGXXA

SEQ ID NO: 9657 - protein, 15 aa, Artificial Sequence
  Synthetically generated peptide
  VARIANT (1)..(15): Xaa = Any Amino Acid
CCELACNPACXTXGA

SEQ ID NO: 9658 - protein, 16 aa, Artificial Sequence
  Synthetically generated peptide
  VARIANT (1)..(16): Xaa = Any Amino Acid
CCELACNPACXTXXGA

SEQ ID NO: 9659 - protein, 17 aa, Artificial Sequence
  Synthetically generated peptide
  VARIANT (1)..(17): Xaa = Any Amino Acid
CCELACNPACXTXXXGA

SEQ ID NO: 9660 - protein, 17 aa, Artificial Sequence
  Synthetically generated peptide
  VARIANT (1)..(17): Xaa = Any Amino Acid
CCELACNPACXTXXGXA

SEQ ID NO: 9661 - protein, 16 aa, Artificial Sequence
  Synthetically generated peptide
  VARIANT (1)..(16): Xaa = Any Amino Acid
CCELACNPACXTXGXA

SEQ ID NO: 9662 - protein, 17 aa, Artificial Sequence
  Synthetically generated peptide
  VARIANT (1)..(17): Xaa = Any Amino Acid
CCELACNPACXTXGXXA

SEQ ID NO: 9663 - protein, 15 aa, Artificial Sequence
  Synthetically generated peptide
  VARIANT (1)..(15): Xaa = Any Amino Acid
CCELACNPACXTGXA

SEQ ID NO: 9664 - protein, 16 aa, Artificial Sequence
  Synthetically generated peptide
  VARIANT (1)..(16): Xaa = Any Amino Acid
CCELACNPACXTGXXA

SEQ ID NO: 9665 - protein, 17 aa, Artificial Sequence
  Synthetically generated peptide
  VARIANT (1)..(17): Xaa = Any Amino Acid
CCELACNPACXTGXXXA

SEQ ID NO: 9666 - protein, 14 aa, Artificial Sequence
  Synthetically generated peptide
  VARIANT (1)..(14): Xaa = Any Amino Acid
CCELACNPACTXGA

SEQ ID NO: 9667 - protein, 15 aa, Artificial Sequence
  Synthetically generated peptide
  VARIANT (1)..(15): Xaa = Any Amino Acid
CCELACNPACTXXGA

SEQ ID NO: 9668 - protein, 16 aa, Artificial Sequence
  Synthetically generated peptide
  VARIANT (1)..(16): Xaa = Any Amino Acid
CCELACNPACTXXXGA

SEQ ID NO: 9669 - protein, 17 aa, Artificial Sequence
  Synthetically generated peptide
  VARIANT (1)..(17): Xaa = Any Amino Acid
CCELACNPACTXXXXGA

SEQ ID NO: 9670 - protein, 17 aa, Artificial Sequence
  Synthetically generated peptide
  VARIANT (1)..(17): Xaa = Any Amino Acid
CCELACNPACTXXXGXA

SEQ ID NO: 9671 - protein, 16 aa, Artificial Sequence
  Synthetically generated peptide
  VARIANT (1)..(16): Xaa = Any Amino Acid
CCELACNPACTXXGXA

SEQ ID NO: 9672 - protein, 17 aa, Artificial Sequence
  Synthetically generated peptide
  VARIANT (1)..(17): Xaa = Any Amino Acid
CCELACNPACTXXGXXA

SEQ ID NO: 9673 - protein, 15 aa, Artificial Sequence
  Synthetically generated peptide
  VARIANT (1)..(15): Xaa = Any Amino Acid
CCELACNPACTXGXA

SEQ ID NO: 9674 - protein, 16 aa, Artificial Sequence
  Synthetically generated peptide
  VARIANT (1)..(16): Xaa = Any Amino Acid
CCELACNPACTXGXXA

SEQ ID NO: 9675 - protein, 17 aa, Artificial Sequence
  Synthetically generated peptide
  VARIANT (1)..(17): Xaa = Any Amino Acid
CCELACNPACTXGXXXA

SEQ ID NO: 9676 - protein, 14 aa, Artificial Sequence
  Synthetically generated peptide
  VARIANT (1)..(14): Xaa = Any Amino Acid
CCELACNPACTGXA

SEQ ID NO: 9677 - protein, 15 aa, Artificial Sequence
  Synthetically generated peptide
  VARIANT (1)..(15): Xaa = Any Amino Acid
CCELACNPACTGXXA

SEQ ID NO: 9678 - protein, 16 aa, Artificial Sequence
  Synthetically generated peptide
  VARIANT (1)..(16): Xaa = Any Amino Acid
CCELACNPACTGXXXA

SEQ ID NO: 9679 - protein, 17 aa, Artificial Sequence
  Synthetically generated peptide
  VARIANT (1)..(17): Xaa = Any Amino Acid
CCELACNPACTGXXXXA

SEQ ID NO: 9680 - protein, 14 aa, Artificial Sequence
  Synthetically generated peptide
  VARIANT (1)..(14): Xaa = Any Amino Acid
ACXEYCANPACTGC

SEQ ID NO: 9681 - protein, 15 aa, Artificial Sequence
  Synthetically generated peptide
  VARIANT (1)..(15): Xaa = Any Amino Acid
ACXXEYCANPACTGC

SEQ ID NO: 9682 - protein, 16 aa, Artificial Sequence
  Synthetically generated peptide
  VARIANT (1)..(16): Xaa = Any Amino Acid
ACXXXEYCANPACTGC

SEQ ID NO: 9683 - protein, 17 aa, Artificial Sequence
  Synthetically generated peptide
  VARIANT (1)..(17): Xaa = Any Amino Acid
ACXXXXEYCANPACTGC

SEQ ID NO: 9684 - protein, 17 aa, Artificial Sequence
  Synthetically generated peptide
  VARIANT (1)..(17): Xaa = Any Amino Acid
ACXXXEXYCANPACTGC

SEQ ID NO: 9685 - protein, 17 aa, Artificial Sequence
  Synthetically generated peptide
  VARIANT (1)..(17): Xaa = Any Amino Acid
ACXXXEYXCANPACTGC

SEQ ID NO: 9686 - protein, 17 aa, Artificial Sequence
  Synthetically generated peptide
  VARIANT (1)..(17): Xaa = Any Amino Acid
ACXXXEYCAXNPACTGC

SEQ ID NO: 9687 - protein, 17 aa, Artificial Sequence
  Synthetically generated peptide
  VARIANT (1)..(17): Xaa = Any Amino Acid
ACXXXEYCANXPACTGC

SEQ ID NO: 9688 - protein, 17 aa, Artificial Sequence
  Synthetically generated peptide
  VARIANT (1)..(17): Xaa = Any Amino Acid
ACXXXEYCANPXACTGC

SEQ ID NO: 9689 - protein, 17 aa, Artificial Sequence
  Synthetically generated peptide
  VARIANT (1)..(17): Xaa = Any Amino Acid
ACXXXEYCANPAXCTGC

SEQ ID NO: 9690 - protein, 17 aa, Artificial Sequence
  Synthetically generated peptide
  VARIANT (1)..(17): Xaa = Any Amino Acid
ACXXXEYCANPACXTGC

SEQ ID NO: 9691 - protein, 17 aa, Artificial Sequence
  Synthetically generated peptide
  VARIANT (1)..(17): Xaa = Any Amino Acid
ACXXXEYCANPACTXGC

SEQ ID NO: 9692 - protein, 17 aa, Artificial Sequence
  Synthetically generated peptide
  VARIANT (1)..(17): Xaa = Any Amino Acid
ACXXXEYCANPACTGXC

SEQ ID NO: 9693 - protein, 16 aa, Artificial Sequence
  Synthetically generated peptide
  VARIANT (1)..(16): Xaa = Any Amino Acid
ACXXEXYCANPACTGC

SEQ ID NO: 9694 - protein, 17 aa, Artificial Sequence
  Synthetically generated peptide
  VARIANT (1)..(17): Xaa = Any Amino Acid
ACXXEXXYCANPACTGC

SEQ ID NO: 9695 - protein, 17 aa, Artificial Sequence
  Synthetically generated peptide
  VARIANT (1)..(17): Xaa = Any Amino Acid
ACXXEXYXCANPACTGC

SEQ ID NO: 9696 - protein, 17 aa, Artificial Sequence
  Synthetically generated peptide
  VARIANT (1)..(17): Xaa = Any Amino Acid
ACXXEXYCAXNPACTGC

SEQ ID NO: 9697 - protein, 17 aa, Artificial Sequence
  Synthetically generated peptide
  VARIANT (1)..(17): Xaa = Any Amino Acid
ACXXEXYCANXPACTGC

SEQ ID NO: 9698 - protein, 17 aa, Artificial Sequence
  Synthetically generated peptide
  VARIANT (1)..(17): Xaa = Any Amino Acid
ACXXEXYCANPXACTGC

SEQ ID NO: 9699 - protein, 17 aa, Artificial Sequence
  Synthetically generated peptide
  VARIANT (1)..(17): Xaa = Any Amino Acid
ACXXEXYCANPAXCTGC

SEQ ID NO: 9700 - protein, 17 aa, Artificial Sequence
  Synthetically generated peptide
  VARIANT (1)..(17): Xaa = Any Amino Acid
ACXXEXYCANPACXTGC

SEQ ID NO: 9701 - protein, 17 aa, Artificial Sequence
  Synthetically generated peptide
  VARIANT (1)..(17): Xaa = Any Amino Acid
ACXXEXYCANPACTXGC

SEQ ID NO: 9702 - protein, 17 aa, Artificial Sequence
  Synthetically generated peptide
  VARIANT (1)..(17): Xaa = Any Amino Acid
ACXXEXYCANPACTGXC

SEQ ID NO: 9703 - protein, 16 aa, Artificial Sequence
  Synthetically generated peptide
  VARIANT (1)..(16): Xaa = Any Amino Acid
ACXXEYXCANPACTGC

SEQ ID NO: 9704 - protein, 17 aa, Artificial Sequence
  Synthetically generated peptide
  VARIANT (1)..(17): Xaa = Any Amino Acid
ACXXEYXXCANPACTGC

SEQ ID NO: 9705 - protein, 17 aa, Artificial Sequence
  Synthetically generated peptide
  VARIANT (1)..(17): Xaa = Any Amino Acid
ACXXEYXCAXNPACTGC

SEQ ID NO: 9706 - protein, 17 aa, Artificial Sequence
  Synthetically generated peptide
  VARIANT (1)..(17): Xaa = Any Amino Acid
ACXXEYXCANXPACTGC

SEQ ID NO: 9707 - protein, 17 aa, Artificial Sequence
  Synthetically generated peptide
  VARIANT (1)..(17): Xaa = Any Amino Acid
ACXXEYXCANPXACTGC

SEQ ID NO: 9708 - protein, 17 aa, Artificial Sequence
  Synthetically generated peptide
  VARIANT (1)..(17): Xaa = Any Amino Acid
ACXXEYXCANPAXCTGC

SEQ ID NO: 9709 - protein, 17 aa, Artificial Sequence
  Synthetically generated peptide
  VARIANT (1)..(17): Xaa = Any Amino Acid
ACXXEYXCANPACXTGC

SEQ ID NO: 9710 - protein, 17 aa, Artificial Sequence
  Synthetically generated peptide
  VARIANT (1)..(17): Xaa = Any Amino Acid
ACXXEYXCANPACTXGC

SEQ ID NO: 9711 - protein, 17 aa, Artificial Sequence
  Synthetically generated peptide
  VARIANT (1)..(17): Xaa = Any Amino Acid
ACXXEYXCANPACTGXC

SEQ ID NO: 9712 - protein, 16 aa, Artificial Sequence
  Synthetically generated peptide
  VARIANT (1)..(16): Xaa = Any Amino Acid
ACXXEYCAXNPACTGC

SEQ ID NO: 9713 - protein, 17 aa, Artificial Sequence
  Synthetically generated peptide
  VARIANT (1)..(17): Xaa = Any Amino Acid
ACXXEYCAXXNPACTGC

SEQ ID NO: 9714 - protein, 17 aa, Artificial Sequence
  Synthetically generated peptide
  VARIANT (1)..(17): Xaa = Any Amino Acid
ACXXEYCAXNXPACTGC

SEQ ID NO: 9715 - protein, 17 aa, Artificial Sequence
  Synthetically generated peptide
  VARIANT (1)..(17): Xaa = Any Amino Acid
ACXXEYCAXNPXACTGC

SEQ ID NO: 9716 - protein, 17 aa, Artificial Sequence
  Synthetically generated peptide
  VARIANT (1)..(17): Xaa = Any Amino Acid
ACXXEYCAXNPAXCTGC

SEQ ID NO: 9717 - protein, 17 aa, Artificial Sequence
  Synthetically generated peptide
  VARIANT (1)..(17): Xaa = Any Amino Acid
ACXXEYCAXNPACXTGC

SEQ ID NO: 9718 - protein, 17 aa, Artificial Sequence
  Synthetically generated peptide
  VARIANT (1)..(17): Xaa = Any Amino Acid
ACXXEYCAXNPACTXGC

SEQ ID NO: 9719 - protein, 17 aa, Artificial Sequence
  Synthetically generated peptide
  VARIANT (1)..(17): Xaa = Any Amino Acid
ACXXEYCAXNPACTGXC

SEQ ID NO: 9720 - protein, 16 aa, Artificial Sequence
  Synthetically generated peptide
  VARIANT (1)..(16): Xaa = Any Amino Acid
ACXXEYCANXPACTGC

SEQ ID NO: 9721 - protein, 17 aa, Artificial Sequence
  Synthetically generated peptide
  VARIANT (1)..(17): Xaa = Any Amino Acid
ACXXEYCANXXPACTGC

SEQ ID NO: 9722 - protein, 17 aa, Artificial Sequence
  Synthetically generated peptide
  VARIANT (1)..(17): Xaa = Any Amino Acid
ACXXEYCANXPXACTGC

SEQ ID NO: 9723 - protein, 17 aa, Artificial Sequence
  Synthetically generated peptide
  VARIANT (1)..(17): Xaa = Any Amino Acid
ACXXEYCANXPAXCTGC

SEQ ID NO: 9724 - protein, 17 aa, Artificial Sequence
  Synthetically generated peptide
  VARIANT (1)..(17): Xaa = Any Amino Acid
ACXXEYCANXPACXTGC

SEQ ID NO: 9725 - protein, 17 aa, Artificial Sequence
  Synthetically generated peptide
  VARIANT (1)..(17): Xaa = Any Amino Acid
ACXXEYCANXPACTXGC

SEQ ID NO: 9726 - protein, 17 aa, Artificial Sequence
  Synthetically generated peptide
  VARIANT (1)..(17): Xaa = Any Amino Acid
ACXXEYCANXPACTGXC

SEQ ID NO: 9727 - protein, 16 aa, Artificial Sequence
  Synthetically generated peptide
  VARIANT (1)..(16): Xaa = Any Amino Acid
ACXXEYCANPXACTGC

SEQ ID NO: 9728 - protein, 17 aa, Artificial Sequence
  Synthetically generated peptide
  VARIANT (1)..(17): Xaa = Any Amino Acid
ACXXEYCANPXXACTGC

SEQ ID NO: 9729 - protein, 17 aa, Artificial Sequence
  Synthetically generated peptide
  VARIANT (1)..(17): Xaa = Any Amino Acid
ACXXEYCANPXAXCTGC

SEQ ID NO: 9730 - protein, 17 aa, Artificial Sequence
  Synthetically generated peptide
  VARIANT (1)..(17): Xaa = Any Amino Acid
ACXXEYCANPXACXTGC

SEQ ID NO: 9731 - protein, 17 aa, Artificial Sequence
  Synthetically generated peptide
  VARIANT (1)..(17): Xaa = Any Amino Acid
ACXXEYCANPXACTXGC

SEQ ID NO: 9732 - protein, 17 aa, Artificial Sequence
  Synthetically generated peptide
  VARIANT (1)..(17): Xaa = Any Amino Acid
ACXXEYCANPXACTGXC

SEQ ID NO: 9733 - protein, 16 aa, Artificial Sequence
  Synthetically generated peptide
  VARIANT (1)..(16): Xaa = Any Amino Acid
ACXXEYCANPAXCTGC

SEQ ID NO: 9734 - protein, 17 aa, Artificial Sequence
  Synthetically generated peptide
  VARIANT (1)..(17): Xaa = Any Amino Acid
ACXXEYCANPAXXCTGC

SEQ ID NO: 9735 - protein, 17 aa, Artificial Sequence
  Synthetically generated peptide
  VARIANT (1)..(17): Xaa = Any Amino Acid
ACXXEYCANPAXCXTGC

SEQ ID NO: 9736 - protein, 17 aa, Artificial Sequence
  Synthetically generated peptide
  VARIANT (1)..(17): Xaa = Any Amino Acid
ACXXEYCANPAXCTXGC

SEQ ID NO: 9737 - protein, 17 aa, Artificial Sequence
  Synthetically generated peptide
  VARIANT (1)..(17): Xaa = Any Amino Acid
ACXXEYCANPAXCTGXC

SEQ ID NO: 9738 - protein, 16 aa, Artificial Sequence
  Synthetically generated peptide
  VARIANT (1)..(16): Xaa = Any Amino Acid
ACXXEYCANPACXTGC

SEQ ID NO: 9739 - protein, 17 aa, Artificial Sequence
  Synthetically generated peptide
  VARIANT (1)..(17): Xaa = Any Amino Acid
ACXXEYCANPACXXTGC

SEQ ID NO: 9740 - protein, 17 aa, Artificial Sequence
  Synthetically generated peptide
  VARIANT (1)..(17): Xaa = Any Amino Acid
ACXXEYCANPACXTXGC

SEQ ID NO: 9741 - protein, 17 aa, Artificial Sequence
  Synthetically generated peptide
  VARIANT (1)..(17): Xaa = Any Amino Acid
ACXXEYCANPACXTGXC

SEQ ID NO: 9742 - protein, 16 aa, Artificial Sequence
  Synthetically generated peptide
  VARIANT (1)..(16): Xaa = Any Amino Acid
ACXXEYCANPACTXGC

SEQ ID NO: 9743 - protein, 17 aa, Artificial Sequence
  Synthetically generated peptide
  VARIANT (1)..(17): Xaa = Any Amino Acid
ACXXEYCANPACTXXGC

SEQ ID NO: 9744 - protein, 17 aa, Artificial Sequence
  Synthetically generated peptide
  VARIANT (1)..(17): Xaa = Any Amino Acid
ACXXEYCANPACTXGXC

SEQ ID NO: 9745 - protein, 16 aa, Artificial Sequence
  Synthetically generated peptide
  VARIANT (1)..(16): Xaa = Any Amino Acid
ACXXEYCANPACTGXC

SEQ ID NO: 9746 - protein, 17 aa, Artificial Sequence
  Synthetically generated peptide
  VARIANT (1)..(17): Xaa = Any Amino Acid
ACXXEYCANPACTGXXC

SEQ ID NO: 9747 - protein, 15 aa, Artificial Sequence
  Synthetically generated peptide
  VARIANT (1)..(15): Xaa = Any Amino Acid
ACXEXYCANPACTGC

SEQ ID NO: 9748 - protein, 16 aa, Artificial Sequence
  Synthetically generated peptide
  VARIANT (1)..(16): Xaa = Any Amino Acid
ACXEXXYCANPACTGC

SEQ ID NO: 9749 - protein, 17 aa, Artificial Sequence
  Synthetically generated peptide
  VARIANT (1)..(17): Xaa = Any Amino Acid
ACXEXXXYCANPACTGC

SEQ ID NO: 9750 - protein, 17 aa, Artificial Sequence
  Synthetically generated peptide
  VARIANT (1)..(17): Xaa = Any Amino Acid
ACXEXXYXCANPACTGC

SEQ ID NO: 9751 - protein, 17 aa, Artificial Sequence
  Synthetically generated peptide
  VARIANT (1)..(17): Xaa = Any Amino Acid
ACXEXXYCAXNPACTGC

SEQ ID NO: 9752 - protein, 17 aa, Artificial Sequence
  Synthetically generated peptide
  VARIANT (1)..(17): Xaa = Any Amino Acid
ACXEXXYCANXPACTGC

SEQ ID NO: 9753 - protein, 17 aa, Artificial Sequence
  Synthetically generated peptide
  VARIANT (1)..(17): Xaa = Any Amino Acid
ACXEXXYCANPXACTGC

SEQ ID NO: 9754 - protein, 17 aa, Artificial Sequence
  Synthetically generated peptide
  VARIANT (1)..(17): Xaa = Any Amino Acid
ACXEXXYCANPAXCTGC

SEQ ID NO: 9755 - protein, 17 aa, Artificial Sequence
  Synthetically generated peptide
  VARIANT (1)..(17): Xaa = Any Amino Acid
ACXEXXYCANPACXTGC

SEQ ID NO: 9756 - protein, 17 aa, Artificial Sequence
  Synthetically generated peptide
  VARIANT (1)..(17): Xaa = Any Amino Acid
ACXEXXYCANPACTXGC

SEQ ID NO: 9757 - protein, 17 aa, Artificial Sequence
  Synthetically generated peptide
  VARIANT (1)..(17): Xaa = Any Amino Acid
ACXEXXYCANPACTGXC

SEQ ID NO: 9758 - protein, 16 aa, Artificial Sequence
  Synthetically generated peptide
  VARIANT (1)..(16): Xaa = Any Amino Acid
ACXEXYXCANPACTGC

SEQ ID NO: 9759 - protein, 17 aa, Artificial Sequence
  Synthetically generated peptide
  VARIANT (1)..(17): Xaa = Any Amino Acid
ACXEXYXXCANPACTGC

SEQ ID NO: 9760 - protein, 17 aa, Artificial Sequence
  Synthetically generated peptide
  VARIANT (1)..(17): Xaa = Any Amino Acid
ACXEXYXCAXNPACTGC

SEQ ID NO: 9761 - protein, 17 aa, Artificial Sequence
  Synthetically generated peptide
  VARIANT (1)..(17): Xaa = Any Amino Acid
ACXEXYXCANXPACTGC

SEQ ID NO: 9762 - protein, 17 aa, Artificial Sequence
  Synthetically generated peptide
  VARIANT (1)..(17): Xaa = Any Amino Acid
ACXEXYXCANPXACTGC

SEQ ID NO: 9763 - protein, 17 aa, Artificial Sequence
  Synthetically generated peptide
  VARIANT (1)..(17): Xaa = Any Amino Acid
ACXEXYXCANPAXCTGC

SEQ ID NO: 9764 - protein, 17 aa, Artificial Sequence
  Synthetically generated peptide
  VARIANT (1)..(17): Xaa = Any Amino Acid
ACXEXYXCANPACXTGC

SEQ ID NO: 9765 - protein, 17 aa, Artificial Sequence
  Synthetically generated peptide
  VARIANT (1)..(17): Xaa = Any Amino Acid
ACXEXYXCANPACTXGC

SEQ ID NO: 9766 - protein, 17 aa, Artificial Sequence
  Synthetically generated peptide
  VARIANT (1)..(17): Xaa = Any Amino Acid
ACXEXYXCANPACTGXC

SEQ ID NO: 9767 - protein, 16 aa, Artificial Sequence
  Synthetically generated peptide
  VARIANT (1)..(16): Xaa = Any Amino Acid
ACXEXYCAXNPACTGC

SEQ ID NO: 9768 - protein, 17 aa, Artificial Sequence
  Synthetically generated peptide
  VARIANT (1)..(17): Xaa = Any Amino Acid
ACXEXYCAXXNPACTGC

SEQ ID NO: 9769 - protein, 17 aa, Artificial Sequence
  Synthetically generated peptide
  VARIANT (1)..(17): Xaa = Any Amino Acid
ACXEXYCAXNXPACTGC

SEQ ID NO: 9770 - protein, 17 aa, Artificial Sequence
  Synthetically generated peptide
  VARIANT (1)..(17): Xaa = Any Amino Acid
ACXEXYCAXNPXACTGC

SEQ ID NO: 9771 - protein, 17 aa, Artificial Sequence
  Synthetically generated peptide
  VARIANT (1)..(17): Xaa = Any Amino Acid
ACXEXYCAXNPAXCTGC

SEQ ID NO: 9772 - protein, 17 aa, Artificial Sequence
  Synthetically generated peptide
  VARIANT (1)..(17): Xaa = Any Amino Acid
ACXEXYCAXNPACXTGC

SEQ ID NO: 9773 - protein, 17 aa, Artificial Sequence
  Synthetically generated peptide
  VARIANT (1)..(17): Xaa = Any Amino Acid
ACXEXYCAXNPACTXGC

SEQ ID NO: 9774 - protein, 17 aa, Artificial Sequence
  Synthetically generated peptide
  VARIANT (1)..(17): Xaa = Any Amino Acid
ACXEXYCAXNPACTGXC

SEQ ID NO: 9775 - protein, 16 aa, Artificial Sequence
  Synthetically generated peptide
  VARIANT (1)..(16): Xaa = Any Amino Acid
ACXEXYCANXPACTGC

SEQ ID NO: 9776 - protein, 17 aa, Artificial Sequence
  Synthetically generated peptide
  VARIANT (1)..(17): Xaa = Any Amino Acid
ACXEXYCANXXPACTGC

SEQ ID NO: 9777 - protein, 17 aa, Artificial Sequence
  Synthetically generated peptide
  VARIANT (1)..(17): Xaa = Any Amino Acid
ACXEXYCANXPXACTGC

SEQ ID NO: 9778 - protein, 17 aa, Artificial Sequence
  Synthetically generated peptide
  VARIANT (1)..(17): Xaa = Any Amino Acid
ACXEXYCANXPAXCTGC

SEQ ID NO: 9779 - protein, 17 aa, Artificial Sequence
  Synthetically generated peptide
  VARIANT (1)..(17): Xaa = Any Amino Acid
ACXEXYCANXPACXTGC

SEQ ID NO: 9780 - protein, 17 aa, Artificial Sequence
  Synthetically generated peptide
  VARIANT (1)..(17): Xaa = Any Amino Acid
ACXEXYCANXPACTXGC

SEQ ID NO: 9781 - protein, 17 aa, Artificial Sequence
  Synthetically generated peptide
  VARIANT (1)..(17): Xaa = Any Amino Acid
ACXEXYCANXPACTGXC

SEQ ID NO: 9782 - protein, 16 aa, Artificial Sequence
  Synthetically generated peptide
  VARIANT (1)..(16): Xaa = Any Amino Acid
ACXEXYCANPXACTGC

SEQ ID NO: 9783 - protein, 17 aa, Artificial Sequence
  Synthetically generated peptide
  VARIANT (1)..(17): Xaa = Any Amino Acid
ACXEXYCANPXXACTGC

SEQ ID NO: 9784 - protein, 17 aa, Artificial Sequence
  Synthetically generated peptide
  VARIANT (1)..(17): Xaa = Any Amino Acid
ACXEXYCANPXAXCTGC

SEQ ID NO: 9785 - protein, 17 aa, Artificial Sequence
  Synthetically generated peptide
  VARIANT (1)..(17): Xaa = Any Amino Acid
ACXEXYCANPXACXTGC

SEQ ID NO: 9786 - protein, 17 aa, Artificial Sequence
  Synthetically generated peptide
  VARIANT (1)..(17): Xaa = Any Amino Acid
ACXEXYCANPXACTXGC

SEQ ID NO: 9787 - protein, 17 aa, Artificial Sequence
  Synthetically generated peptide
  VARIANT (1)..(17): Xaa = Any Amino Acid
ACXEXYCANPXACTGXC

SEQ ID NO: 9788 - protein, 16 aa, Artificial Sequence
  Synthetically generated peptide
  VARIANT (1)..(16): Xaa = Any Amino Acid
ACXEXYCANPAXCTGC

SEQ ID NO: 9789 - protein, 17 aa, Artificial Sequence
  Synthetically generated peptide
  VARIANT (1)..(17): Xaa = Any Amino Acid
ACXEXYCANPAXXCTGC

SEQ ID NO: 9790 - protein, 17 aa, Artificial Sequence
  Synthetically generated peptide
  VARIANT (1)..(17): Xaa = Any Amino Acid
ACXEXYCANPAXCXTGC

SEQ ID NO: 9791 - protein, 17 aa, Artificial Sequence
  Synthetically generated peptide
  VARIANT (1)..(17): Xaa = Any Amino Acid
ACXEXYCANPAXCTXGC

SEQ ID NO: 9792 - protein, 17 aa, Artificial Sequence
  Synthetically generated peptide
  VARIANT (1)..(17): Xaa = Any Amino Acid
ACXEXYCANPAXCTGXC

SEQ ID NO: 9793 - protein, 16 aa, Artificial Sequence
  Synthetically generated peptide
  VARIANT (1)..(16): Xaa = Any Amino Acid
ACXEXYCANPACXTGC

SEQ ID NO: 9794 - protein, 17 aa, Artificial Sequence
  Synthetically generated peptide
  VARIANT (1)..(17): Xaa = Any Amino Acid
ACXEXYCANPACXXTGC

SEQ ID NO: 9795 - protein, 17 aa, Artificial Sequence
  Synthetically generated peptide
  VARIANT (1)..(17): Xaa = Any Amino Acid
ACXEXYCANPACXTXGC

SEQ ID NO: 9796 - protein, 17 aa, Artificial Sequence
  Synthetically generated peptide
  VARIANT (1)..(17): Xaa = Any Amino Acid
ACXEXYCANPACXTGXC

SEQ ID NO: 9797 - protein, 16 aa, Artificial Sequence
  Synthetically generated peptide
  VARIANT (1)..(16): Xaa = Any Amino Acid
ACXEXYCANPACTXGC

SEQ ID NO: 9798 - protein, 17 aa, Artificial Sequence
  Synthetically generated peptide
  VARIANT (1)..(17): Xaa = Any Amino Acid
ACXEXYCANPACTXXGC

SEQ ID NO: 9799 - protein, 17 aa, Artificial Sequence
  Synthetically generated peptide
  VARIANT (1)..(17): Xaa = Any Amino Acid
ACXEXYCANPACTXGXC

SEQ ID NO: 9800 - protein, 16 aa, Artificial Sequence
  Synthetically generated peptide
  VARIANT (1)..(16): Xaa = Any Amino Acid
ACXEXYCANPACTGXC

SEQ ID NO: 9801 - protein, 17 aa, Artificial Sequence
  Synthetically generated peptide
  VARIANT (1)..(17): Xaa = Any Amino Acid
ACXEXYCANPACTGXXC

SEQ ID NO: 9802 - protein, 15 aa, Artificial Sequence
  Synthetically generated peptide
  VARIANT (1)..(15): Xaa = Any Amino Acid
ACXEYXCANPACTGC

SEQ ID NO: 9803 - protein, 16 aa, Artificial Sequence
  Synthetically generated peptide
  VARIANT (1)..(16): Xaa = Any Amino Acid
ACXEYXXCANPACTGC

SEQ ID NO: 9804 - protein, 17 aa, Artificial Sequence
  Synthetically generated peptide
  VARIANT (1)..(17): Xaa = Any Amino Acid
ACXEYXXXCANPACTGC

SEQ ID NO: 9805 - protein, 17 aa, Artificial Sequence
  Synthetically generated peptide
  VARIANT (1)..(17): Xaa = Any Amino Acid
ACXEYXXCAXNPACTGC

SEQ ID NO: 9806 - protein, 17 aa, Artificial Sequence
  Synthetically generated peptide
  VARIANT (1)..(17): Xaa = Any Amino Acid
ACXEYXXCANXPACTGC

SEQ ID NO: 9807 - protein, 17 aa, Artificial Sequence
  Synthetically generated peptide
  VARIANT (1)..(17): Xaa = Any Amino Acid
ACXEYXXCANPXACTGC

SEQ ID NO: 9808 - protein, 17 aa, Artificial Sequence
  Synthetically generated peptide
  VARIANT (1)..(17): Xaa = Any Amino Acid
ACXEYXXCANPAXCTGC

SEQ ID NO: 9809 - protein, 17 aa, Artificial Sequence
  Synthetically generated peptide
  VARIANT (1)..(17): Xaa = Any Amino Acid
ACXEYXXCANPACXTGC

SEQ ID NO: 9810 - protein, 17 aa, Artificial Sequence
  Synthetically generated peptide
  VARIANT (1)..(17): Xaa = Any Amino Acid
ACXEYXXCANPACTXGC

SEQ ID NO: 9811 - protein, 17 aa, Artificial Sequence
  Synthetically generated peptide
  VARIANT (1)..(17): Xaa = Any Amino Acid
ACXEYXXCANPACTGXC

SEQ ID NO: 9812 - protein, 16 aa, Artificial Sequence
  Synthetically generated peptide
  VARIANT (1)..(16): Xaa = Any Amino Acid
ACXEYXCAXNPACTGC

SEQ ID NO: 9813 - protein, 17 aa, Artificial Sequence
  Synthetically generated peptide
  VARIANT (1)..(17): Xaa = Any Amino Acid
ACXEYXCAXXNPACTGC

SEQ ID NO: 9814 - protein, 17 aa, Artificial Sequence
  Synthetically generated peptide
  VARIANT (1)..(17): Xaa = Any Amino Acid
ACXEYXCAXNXPACTGC

SEQ ID NO: 9815 - protein, 17 aa, Artificial Sequence
  Synthetically generated peptide
  VARIANT (1)..(17): Xaa = Any Amino Acid
ACXEYXCAXNPXACTGC

SEQ ID NO: 9816 - protein, 17 aa, Artificial Sequence
  Synthetically generated peptide
  VARIANT (1)..(17): Xaa = Any Amino Acid
ACXEYXCAXNPAXCTGC

SEQ ID NO: 9817 - protein, 17 aa, Artificial Sequence
  Synthetically generated peptide
  VARIANT (1)..(17): Xaa = Any Amino Acid
ACXEYXCAXNPACXTGC

SEQ ID NO: 9818 - protein, 17 aa, Artificial Sequence
  Synthetically generated peptide
  VARIANT (1)..(17): Xaa = Any Amino Acid
ACXEYXCAXNPACTXGC

SEQ ID NO: 9819 - protein, 17 aa, Artificial Sequence
  Synthetically generated peptide
  VARIANT (1)..(17): Xaa = Any Amino Acid
ACXEYXCAXNPACTGXC

SEQ ID NO: 9820 - protein, 16 aa, Artificial Sequence
  Synthetically generated peptide
  VARIANT (1)..(16): Xaa = Any Amino Acid
ACXEYXCANXPACTGC

SEQ ID NO: 9821 - protein, 17 aa, Artificial Sequence
  Synthetically generated peptide
  VARIANT (1)..(17): Xaa = Any Amino Acid
ACXEYXCANXXPACTGC

SEQ ID NO: 9822 - protein, 17 aa, Artificial Sequence
  Synthetically generated peptide
  VARIANT (1)..(17): Xaa = Any Amino Acid
ACXEYXCANXPXACTGC

SEQ ID NO: 9823 - protein, 17 aa, Artificial Sequence
  Synthetically generated peptide
  VARIANT (1)..(17): Xaa = Any Amino Acid
ACXEYXCANXPAXCTGC

SEQ ID NO: 9824 - protein, 17 aa, Artificial Sequence
  Synthetically generated peptide
  VARIANT (1)..(17): Xaa = Any Amino Acid
ACXEYXCANXPACXTGC

SEQ ID NO: 9825 - protein, 17 aa, Artificial Sequence
  Synthetically generated peptide
  VARIANT (1)..(17): Xaa = Any Amino Acid
ACXEYXCANXPACTXGC

SEQ ID NO: 9826 - protein, 17 aa, Artificial Sequence
  Synthetically generated peptide
  VARIANT (1)..(17): Xaa = Any Amino Acid
ACXEYXCANXPACTGXC

SEQ ID NO: 9827 - protein, 16 aa, Artificial Sequence
  Synthetically generated peptide
  VARIANT (1)..(16): Xaa = Any Amino Acid
ACXEYXCANPXACTGC

SEQ ID NO: 9828 - protein, 17 aa, Artificial Sequence
  Synthetically generated peptide
  VARIANT (1)..(17): Xaa = Any Amino Acid
ACXEYXCANPXXACTGC

SEQ ID NO: 9829 - protein, 17 aa, Artificial Sequence
  Synthetically generated peptide
  VARIANT (1)..(17): Xaa = Any Amino Acid
ACXEYXCANPXAXCTGC

SEQ ID NO: 9830 - protein, 17 aa, Artificial Sequence
  Synthetically generated peptide
  VARIANT (1)..(17): Xaa = Any Amino Acid
ACXEYXCANPXACXTGC

SEQ ID NO: 9831 - protein, 17 aa, Artificial Sequence
  Synthetically generated peptide
  VARIANT (1)..(17): Xaa = Any Amino Acid
ACXEYXCANPXACTXGC

SEQ ID NO: 9832 - protein, 17 aa, Artificial Sequence
  Synthetically generated peptide
  VARIANT (1)..(17): Xaa = Any Amino Acid
ACXEYXCANPXACTGXC

SEQ ID NO: 9833 - protein, 16 aa, Artificial Sequence
  Synthetically generated peptide
  VARIANT (1)..(16): Xaa = Any Amino Acid
ACXEYXCANPAXCTGC

SEQ ID NO: 9834 - protein, 17 aa, Artificial Sequence
  Synthetically generated peptide
  VARIANT (1)..(17): Xaa = Any Amino Acid
ACXEYXCANPAXXCTGC

SEQ ID NO: 9835 - protein, 17 aa, Artificial Sequence
  Synthetically generated peptide
  VARIANT (1)..(17): Xaa = Any Amino Acid
ACXEYXCANPAXCXTGC

SEQ ID NO: 9836 - protein, 17 aa, Artificial Sequence
  Synthetically generated peptide
  VARIANT (1)..(17): Xaa = Any Amino Acid
ACXEYXCANPAXCTXGC

SEQ ID NO: 9837 - protein, 17 aa, Artificial Sequence
  Synthetically generated peptide
  VARIANT (1)..(17): Xaa = Any Amino Acid
ACXEYXCANPAXCTGXC

SEQ ID NO: 9838 - protein, 16 aa, Artificial Sequence
  Synthetically generated peptide
  VARIANT (1)..(16): Xaa = Any Amino Acid
ACXEYXCANPACXTGC

SEQ ID NO: 9839 - protein, 17 aa, Artificial Sequence
  Synthetically generated peptide
  VARIANT (1)..(17): Xaa = Any Amino Acid
ACXEYXCANPACXXTGC

SEQ ID NO: 9840 - protein, 17 aa, Artificial Sequence
  Synthetically generated peptide
  VARIANT (1)..(17): Xaa = Any Amino Acid
ACXEYXCANPACXTXGC

SEQ ID NO: 9841 - protein, 17 aa, Artificial Sequence
  Synthetically generated peptide
  VARIANT (1)..(17): Xaa = Any Amino Acid
ACXEYXCANPACXTGXC

SEQ ID NO: 9842 - protein, 16 aa, Artificial Sequence
  Synthetically generated peptide
  VARIANT (1)..(16): Xaa = Any Amino Acid
ACXEYXCANPACTXGC

SEQ ID NO: 9843 - protein, 17 aa, Artificial Sequence
  Synthetically generated peptide
  VARIANT (1)..(17): Xaa = Any Amino Acid
ACXEYXCANPACTXXGC

SEQ ID NO: 9844 - protein, 17 aa, Artificial Sequence
  Synthetically generated peptide
  VARIANT (1)..(17): Xaa = Any Amino Acid
ACXEYXCANPACTXGXC

SEQ ID NO: 9845 - protein, 16 aa, Artificial Sequence
  Synthetically generated peptide
  VARIANT (1)..(16): Xaa = Any Amino Acid
ACXEYXCANPACTGXC

SEQ ID NO: 9846 - protein, 17 aa, Artificial Sequence
  Synthetically generated peptide
  VARIANT (1)..(17): Xaa = Any Amino Acid
ACXEYXCANPACTGXXC

SEQ ID NO: 9847 - protein, 15 aa, Artificial Sequence
  Synthetically generated peptide
  VARIANT (1)..(15): Xaa = Any Amino Acid
ACXEYCAXNPACTGC

SEQ ID NO: 9848 - protein, 16 aa, Artificial Sequence
  Synthetically generated peptide
  VARIANT (1)..(16): Xaa = Any Amino Acid
ACXEYCAXXNPACTGC

SEQ ID NO: 9849 - protein, 17 aa, Artificial Sequence
  Synthetically generated peptide
  VARIANT (1)..(17): Xaa = Any Amino Acid
ACXEYCAXXXNPACTGC

SEQ ID NO: 9850 - protein, 17 aa, Artificial Sequence
  Synthetically generated peptide
  VARIANT (1)..(17): Xaa = Any Amino Acid
ACXEYCAXXNXPACTGC

SEQ ID NO: 9851 - protein, 17 aa, Artificial Sequence
  Synthetically generated peptide
  VARIANT (1)..(17): Xaa = Any Amino Acid
ACXEYCAXXNPXACTGC

SEQ ID NO: 9852 - protein, 17 aa, Artificial Sequence
  Synthetically generated peptide
  VARIANT (1)..(17): Xaa = Any Amino Acid
ACXEYCAXXNPAXCTGC

SEQ ID NO: 9853 - protein, 17 aa, Artificial Sequence
  Synthetically generated peptide
  VARIANT (1)..(17): Xaa = Any Amino Acid
ACXEYCAXXNPACXTGC

SEQ ID NO: 9854 - protein, 17 aa, Artificial Sequence
  Synthetically generated peptide
  VARIANT (1)..(17): Xaa = Any Amino Acid
ACXEYCAXXNPACTXGC

SEQ ID NO: 9855 - protein, 17 aa, Artificial Sequence
  Synthetically generated peptide
  VARIANT (1)..(17): Xaa = Any Amino Acid
ACXEYCAXXNPACTGXC

SEQ ID NO: 9856 - protein, 16 aa, Artificial Sequence
  Synthetically generated peptide
  VARIANT (1)..(16): Xaa = Any Amino Acid
ACXEYCAXNXPACTGC

SEQ ID NO: 9857 - protein, 17 aa, Artificial Sequence
  Synthetically generated peptide
  VARIANT (1)..(17): Xaa = Any Amino Acid
ACXEYCAXNXXPACTGC

SEQ ID NO: 9858 - protein, 17 aa, Artificial Sequence
  Synthetically generated peptide
  VARIANT (1)..(17): Xaa = Any Amino Acid
ACXEYCAXNXPXACTGC

SEQ ID NO: 9859 - protein, 17 aa, Artificial Sequence
  Synthetically generated peptide
  VARIANT (1)..(17): Xaa = Any Amino Acid
ACXEYCAXNXPAXCTGC

SEQ ID NO: 9860 - protein, 17 aa, Artificial Sequence
  Synthetically generated peptide
  VARIANT (1)..(17): Xaa = Any Amino Acid
ACXEYCAXNXPACXTGC

SEQ ID NO: 9861 - protein, 17 aa, Artificial Sequence
  Synthetically generated peptide
  VARIANT (1)..(17): Xaa = Any Amino Acid
ACXEYCAXNXPACTXGC

SEQ ID NO: 9862 - protein, 17 aa, Artificial Sequence
  Synthetically generated peptide
  VARIANT (1)..(17): Xaa = Any Amino Acid
ACXEYCAXNXPACTGXC

SEQ ID NO: 9863 - protein, 16 aa, Artificial Sequence
  Synthetically generated peptide
  VARIANT (1)..(16): Xaa = Any Amino Acid
ACXEYCAXNPXACTGC

SEQ ID NO: 9864 - protein, 17 aa, Artificial Sequence
  Synthetically generated peptide
  VARIANT (1)..(17): Xaa = Any Amino Acid
ACXEYCAXNPXXACTGC

SEQ ID NO: 9865 - protein, 17 aa, Artificial Sequence
  Synthetically generated peptide
  VARIANT (1)..(17): Xaa = Any Amino Acid
ACXEYCAXNPXAXCTGC

SEQ ID NO: 9866 - protein, 17 aa, Artificial Sequence
  Synthetically generated peptide
  VARIANT (1)..(17): Xaa = Any Amino Acid
ACXEYCAXNPXACXTGC

SEQ ID NO: 9867 - protein, 17 aa, Artificial Sequence
  Synthetically generated peptide
  VARIANT (1)..(17): Xaa = Any Amino Acid
ACXEYCAXNPXACTXGC

SEQ ID NO: 9868 - protein, 17 aa, Artificial Sequence
  Synthetically generated peptide
  VARIANT (1)..(17): Xaa = Any Amino Acid
ACXEYCAXNPXACTGXC

SEQ ID NO: 9869 - protein, 16 aa, Artificial Sequence
  Synthetically generated peptide
  VARIANT (1)..(16): Xaa = Any Amino Acid
ACXEYCAXNPAXCTGC

SEQ ID NO: 9870 - protein, 17 aa, Artificial Sequence
  Synthetically generated peptide
  VARIANT (1)..(17): Xaa = Any Amino Acid
ACXEYCAXNPAXXCTGC

SEQ ID NO: 9871 - protein, 17 aa, Artificial Sequence
  Synthetically generated peptide
  VARIANT (1)..(17): Xaa = Any Amino Acid
ACXEYCAXNPAXCXTGC

SEQ ID NO: 9872 - protein, 17 aa, Artificial Sequence
  Synthetically generated peptide
  VARIANT (1)..(17): Xaa = Any Amino Acid
ACXEYCAXNPAXCTXGC

SEQ ID NO: 9873 - protein, 17 aa, Artificial Sequence
  Synthetically generated peptide
  VARIANT (1)..(17): Xaa = Any Amino Acid
ACXEYCAXNPAXCTGXC

SEQ ID NO: 9874 - protein, 16 aa, Artificial Sequence
  Synthetically generated peptide
  VARIANT (1)..(16): Xaa = Any Amino Acid
ACXEYCAXNPACXTGC

SEQ ID NO: 9875 - protein, 17 aa, Artificial Sequence
  Synthetically generated peptide
  VARIANT (1)..(17): Xaa = Any Amino Acid
ACXEYCAXNPACXXTGC

SEQ ID NO: 9876 - protein, 17 aa, Artificial Sequence
  Synthetically generated peptide
  VARIANT (1)..(17): Xaa = Any Amino Acid
ACXEYCAXNPACXTXGC

SEQ ID NO: 9877 - protein, 17 aa, Artificial Sequence
  Synthetically generated peptide
  VARIANT (1)..(17): Xaa = Any Amino Acid
ACXEYCAXNPACXTGXC

SEQ ID NO: 9878 - protein, 16 aa, Artificial Sequence
  Synthetically generated peptide
  VARIANT (1)..(16): Xaa = Any Amino Acid
ACXEYCAXNPACTXGC

SEQ ID NO: 9879 - protein, 17 aa, Artificial Sequence
  Synthetically generated peptide
  VARIANT (1)..(17): Xaa = Any Amino Acid
ACXEYCAXNPACTXXGC

SEQ ID NO: 9880 - protein, 17 aa, Artificial Sequence
  Synthetically generated peptide
  VARIANT (1)..(17): Xaa = Any Amino Acid
ACXEYCAXNPACTXGXC

SEQ ID NO: 9881 - protein, 16 aa, Artificial Sequence
  Synthetically generated peptide
  VARIANT (1)..(16): Xaa = Any Amino Acid
ACXEYCAXNPACTGXC

SEQ ID NO: 9882 - protein, 17 aa, Artificial Sequence
  Synthetically generated peptide
  VARIANT (1)..(17): Xaa = Any Amino Acid
ACXEYCAXNPACTGXXC

SEQ ID NO: 9883 - protein, 15 aa, Artificial Sequence
  Synthetically generated peptide
  VARIANT (1)..(15): Xaa = Any Amino Acid
ACXEYCANXPACTGC

SEQ ID NO: 9884 - protein, 16 aa, Artificial Sequence
  Synthetically generated peptide
  VARIANT (1)..(16): Xaa = Any Amino Acid
ACXEYCANXXPACTGC

SEQ ID NO: 9885 - protein, 17 aa, Artificial Sequence
  Synthetically generated peptide
  VARIANT (1)..(17): Xaa = Any Amino Acid
ACXEYCANXXXPACTGC

SEQ ID NO: 9886 - protein, 17 aa, Artificial Sequence
  Synthetically generated peptide
  VARIANT (1)..(17): Xaa = Any Amino Acid
ACXEYCANXXPXACTGC

SEQ ID NO: 9887 - protein, 17 aa, Artificial Sequence
  Synthetically generated peptide
  VARIANT (1)..(17): Xaa = Any Amino Acid
ACXEYCANXXPAXCTGC

SEQ ID NO: 9888 - protein, 17 aa, Artificial Sequence
  Synthetically generated peptide
  VARIANT (1)..(17): Xaa = Any Amino Acid
ACXEYCANXXPACXTGC

SEQ ID NO: 9889 - protein, 17 aa, Artificial Sequence
  Synthetically generated peptide
  VARIANT (1)..(17): Xaa = Any Amino Acid
ACXEYCANXXPACTXGC

SEQ ID NO: 9890 - protein, 17 aa, Artificial Sequence
  Synthetically generated peptide
  VARIANT (1)..(17): Xaa = Any Amino Acid
ACXEYCANXXPACTGXC

SEQ ID NO: 9891 - protein, 16 aa, Artificial Sequence
  Synthetically generated peptide
  VARIANT (1)..(16): Xaa = Any Amino Acid
ACXEYCANXPXACTGC

SEQ ID NO: 9892 - protein, 17 aa, Artificial Sequence
  Synthetically generated peptide
  VARIANT (1)..(17): Xaa = Any Amino Acid
ACXEYCANXPXXACTGC

SEQ ID NO: 9893 - protein, 17 aa, Artificial Sequence
  Synthetically generated peptide
  VARIANT (1)..(17): Xaa = Any Amino Acid
ACXEYCANXPXAXCTGC

SEQ ID NO: 9894 - protein, 17 aa, Artificial Sequence
  Synthetically generated peptide
  VARIANT (1)..(17): Xaa = Any Amino Acid
ACXEYCANXPXACXTGC

SEQ ID NO: 9895 - protein, 17 aa, Artificial Sequence
  Synthetically generated peptide
  VARIANT (1)..(17): Xaa = Any Amino Acid
ACXEYCANXPXACTXGC

SEQ ID NO: 9896 - protein, 17 aa, Artificial Sequence
  Synthetically generated peptide
  VARIANT (1)..(17): Xaa = Any Amino Acid
ACXEYCANXPXACTGXC

SEQ ID NO: 9897 - protein, 16 aa, Artificial Sequence
  Synthetically generated peptide
  VARIANT (1)..(16): Xaa = Any Amino Acid
ACXEYCANXPAXCTGC

SEQ ID NO: 9898 - protein, 17 aa, Artificial Sequence
  Synthetically generated peptide
  VARIANT (1)..(17): Xaa = Any Amino Acid
ACXEYCANXPAXXCTGC

SEQ ID NO: 9899 - protein, 17 aa, Artificial Sequence
  Synthetically generated peptide
  VARIANT (1)..(17): Xaa = Any Amino Acid
ACXEYCANXPAXCXTGC

SEQ ID NO: 9900 - protein, 17 aa, Artificial Sequence
  Synthetically generated peptide
  VARIANT (1)..(17): Xaa = Any Amino Acid
ACXEYCANXPAXCTXGC

SEQ ID NO: 9901 - protein, 17 aa, Artificial Sequence
  Synthetically generated peptide
  VARIANT (1)..(17): Xaa = Any Amino Acid
ACXEYCANXPAXCTGXC

SEQ ID NO: 9902 - protein, 16 aa, Artificial Sequence
  Synthetically generated peptide
  VARIANT (1)..(16): Xaa = Any Amino Acid
ACXEYCANXPACXTGC

SEQ ID NO: 9903 - protein, 17 aa, Artificial Sequence
  Synthetically generated peptide
  VARIANT (1)..(17): Xaa = Any Amino Acid
ACXEYCANXPACXXTGC

SEQ ID NO: 9904 - protein, 17 aa, Artificial Sequence
  Synthetically generated peptide
  VARIANT (1)..(17): Xaa = Any Amino Acid
ACXEYCANXPACXTXGC

SEQ ID NO: 9905 - protein, 17 aa, Artificial Sequence
  Synthetically generated peptide
  VARIANT (1)..(17): Xaa = Any Amino Acid
ACXEYCANXPACXTGXC

SEQ ID NO: 9906 - protein, 16 aa, Artificial Sequence
  Synthetically generated peptide
  VARIANT (1)..(16): Xaa = Any Amino Acid
ACXEYCANXPACTXGC

SEQ ID NO: 9907 - protein, 17 aa, Artificial Sequence
  Synthetically generated peptide
  VARIANT (1)..(17): Xaa = Any Amino Acid
ACXEYCANXPACTXXGC

SEQ ID NO: 9908 - protein, 17 aa, Artificial Sequence
  Synthetically generated peptide
  VARIANT (1)..(17): Xaa = Any Amino Acid
ACXEYCANXPACTXGXC

SEQ ID NO: 9909 - protein, 16 aa, Artificial Sequence
  Synthetically generated peptide
  VARIANT (1)..(16): Xaa = Any Amino Acid
ACXEYCANXPACTGXC

SEQ ID NO: 9910 - protein, 17 aa, Artificial Sequence
  Synthetically generated peptide
  VARIANT (1)..(17): Xaa = Any Amino Acid
ACXEYCANXPACTGXXC

SEQ ID NO: 9911 - protein, 15 aa, Artificial Sequence
  Synthetically generated peptide
  VARIANT (1)..(15): Xaa = Any Amino Acid
ACXEYCANPXACTGC

SEQ ID NO: 9912 - protein, 16 aa, Artificial Sequence
  Synthetically generated peptide
  VARIANT (1)..(16): Xaa = Any Amino Acid
ACXEYCANPXXACTGC

SEQ ID NO: 9913 - protein, 17 aa, Artificial Sequence
  Synthetically generated peptide
  VARIANT (1)..(17): Xaa = Any Amino Acid
ACXEYCANPXXXACTGC

SEQ ID NO: 9914 - protein, 17 aa, Artificial Sequence
  Synthetically generated peptide
  VARIANT (1)..(17): Xaa = Any Amino Acid
ACXEYCANPXXAXCTGC

SEQ ID NO: 9915 - protein, 17 aa, Artificial Sequence
  Synthetically generated peptide
  VARIANT (1)..(17): Xaa = Any Amino Acid
ACXEYCANPXXACXTGC

SEQ ID NO: 9916 - protein, 17 aa, Artificial Sequence
  Synthetically generated peptide
  VARIANT (1)..(17): Xaa = Any Amino Acid
ACXEYCANPXXACTXGC

SEQ ID NO: 9917 - protein, 17 aa, Artificial Sequence
  Synthetically generated peptide
  VARIANT (1)..(17): Xaa = Any Amino Acid
ACXEYCANPXXACTGXC

SEQ ID NO: 9918 - protein, 16 aa, Artificial Sequence
  Synthetically generated peptide
  VARIANT (1)..(16): Xaa = Any Amino Acid
ACXEYCANPXAXCTGC

SEQ ID NO: 9919 - protein, 17 aa, Artificial Sequence
  Synthetically generated peptide
  VARIANT (1)..(17): Xaa = Any Amino Acid
ACXEYCANPXAXXCTGC

SEQ ID NO: 9920 - protein, 17 aa, Artificial Sequence
  Synthetically generated peptide
  VARIANT (1)..(17): Xaa = Any Amino Acid
ACXEYCANPXAXCXTGC

SEQ ID NO: 9921 - protein, 17 aa, Artificial Sequence
  Synthetically generated peptide
  VARIANT (1)..(17): Xaa = Any Amino Acid
ACXEYCANPXAXCTXGC

SEQ ID NO: 9922 - protein, 17 aa, Artificial Sequence
  Synthetically generated peptide
  VARIANT (1)..(17): Xaa = Any Amino Acid
ACXEYCANPXAXCTGXC

SEQ ID NO: 9923 - protein, 16 aa, Artificial Sequence
  Synthetically generated peptide
  VARIANT (1)..(16): Xaa = Any Amino Acid
ACXEYCANPXACXTGC

SEQ ID NO: 9924 - protein, 17 aa, Artificial Sequence
  Synthetically generated peptide
  VARIANT (1)..(17): Xaa = Any Amino Acid
ACXEYCANPXACXXTGC

SEQ ID NO: 9925 - protein, 17 aa, Artificial Sequence
  Synthetically generated peptide
  VARIANT (1)..(17): Xaa = Any Amino Acid
ACXEYCANPXACXTXGC

SEQ ID NO: 9926 - protein, 17 aa, Artificial Sequence
  Synthetically generated peptide
  VARIANT (1)..(17): Xaa = Any Amino Acid
ACXEYCANPXACXTGXC

SEQ ID NO: 9927 - protein, 16 aa, Artificial Sequence
  Synthetically generated peptide
  VARIANT (1)..(16): Xaa = Any Amino Acid
ACXEYCANPXACTXGC

SEQ ID NO: 9928 - protein, 17 aa, Artificial Sequence
  Synthetically generated peptide
  VARIANT (1)..(17): Xaa = Any Amino Acid
ACXEYCANPXACTXXGC

SEQ ID NO: 9929 - protein, 17 aa, Artificial Sequence
  Synthetically generated peptide
  VARIANT (1)..(17): Xaa = Any Amino Acid
ACXEYCANPXACTXGXC

SEQ ID NO: 9930 - protein, 16 aa, Artificial Sequence
  Synthetically generated peptide
  VARIANT (1)..(16): Xaa = Any Amino Acid
ACXEYCANPXACTGXC

SEQ ID NO: 9931 - protein, 17 aa, Artificial Sequence
  Synthetically generated peptide
  VARIANT (1)..(17): Xaa = Any Amino Acid
ACXEYCANPXACTGXXC

SEQ ID NO: 9932 - protein, 15 aa, Artificial Sequence
  Synthetically generated peptide
  VARIANT (1)..(15): Xaa = Any Amino Acid
ACXEYCANPAXCTGC

SEQ ID NO: 9933 - protein, 16 aa, Artificial Sequence
  Synthetically generated peptide
  VARIANT (1)..(16): Xaa = Any Amino Acid
ACXEYCANPAXXCTGC

SEQ ID NO: 9934 - protein, 17 aa, Artificial Sequence
  Synthetically generated peptide
  VARIANT (1)..(17): Xaa = Any Amino Acid
ACXEYCANPAXXXCTGC

SEQ ID NO: 9935 - protein, 17 aa, Artificial Sequence
  Synthetically generated peptide
  VARIANT (1)..(17): Xaa = Any Amino Acid
ACXEYCANPAXXCXTGC

SEQ ID NO: 9936 - protein, 17 aa, Artificial Sequence
  Synthetically generated peptide
  VARIANT (1)..(17): Xaa = Any Amino Acid
ACXEYCANPAXXCTXGC

SEQ ID NO: 9937 - protein, 17 aa, Artificial Sequence
  Synthetically generated peptide
  VARIANT (1)..(17): Xaa = Any Amino Acid
ACXEYCANPAXXCTGXC

SEQ ID NO: 9938 - protein, 16 aa, Artificial Sequence
  Synthetically generated peptide
  VARIANT (1)..(16): Xaa = Any Amino Acid
ACXEYCANPAXCXTGC

SEQ ID NO: 9939 - protein, 17 aa, Artificial Sequence
  Synthetically generated peptide
  VARIANT (1)..(17): Xaa = Any Amino Acid
ACXEYCANPAXCXXTGC

SEQ ID NO: 9940 - protein, 17 aa, Artificial Sequence
  Synthetically generated peptide
  VARIANT (1)..(17): Xaa = Any Amino Acid
ACXEYCANPAXCXTXGC

SEQ ID NO: 9941 - protein, 17 aa, Artificial Sequence
  Synthetically generated peptide
  VARIANT (1)..(17): Xaa = Any Amino Acid
ACXEYCANPAXCXTGXC

SEQ ID NO: 9942 - protein, 16 aa, Artificial Sequence
  Synthetically generated peptide
  VARIANT (1)..(16): Xaa = Any Amino Acid
ACXEYCANPAXCTXGC

SEQ ID NO: 9943 - protein, 17 aa, Artificial Sequence
  Synthetically generated peptide
  VARIANT (1)..(17): Xaa = Any Amino Acid
ACXEYCANPAXCTXXGC

SEQ ID NO: 9944 - protein, 17 aa, Artificial Sequence
  Synthetically generated peptide
  VARIANT (1)..(17): Xaa = Any Amino Acid
ACXEYCANPAXCTXGXC

SEQ ID NO: 9945 - protein, 16 aa, Artificial Sequence
  Synthetically generated peptide
  VARIANT (1)..(16): Xaa = Any Amino Acid
ACXEYCANPAXCTGXC

SEQ ID NO: 9946 - protein, 17 aa, Artificial Sequence
  Synthetically generated peptide
  VARIANT (1)..(17): Xaa = Any Amino Acid
ACXEYCANPAXCTGXXC

SEQ ID NO: 9947 - protein, 15 aa, Artificial Sequence
  Synthetically generated peptide
  VARIANT (1)..(15): Xaa = Any Amino Acid
ACXEYCANPACXTGC

SEQ ID NO: 9948 - protein, 16 aa, Artificial Sequence
  Synthetically generated peptide
  VARIANT (1)..(16): Xaa = Any Amino Acid
ACXEYCANPACXXTGC

SEQ ID NO: 9949 - protein, 17 aa, Artificial Sequence
  Synthetically generated peptide
  VARIANT (1)..(17): Xaa = Any Amino Acid
ACXEYCANPACXXXTGC

SEQ ID NO: 9950 - protein, 17 aa, Artificial Sequence
  Synthetically generated peptide
  VARIANT (1)..(17): Xaa = Any Amino Acid
ACXEYCANPACXXTXGC

SEQ ID NO: 9951 - protein, 17 aa, Artificial Sequence
  Synthetically generated peptide
  VARIANT (1)..(17): Xaa = Any Amino Acid
ACXEYCANPACXXTGXC

SEQ ID NO: 9952 - protein, 16 aa, Artificial Sequence
  Synthetically generated peptide
  VARIANT (1)..(16): Xaa = Any Amino Acid
ACXEYCANPACXTXGC

SEQ ID NO: 9953 - protein, 17 aa, Artificial Sequence
  Synthetically generated peptide
  VARIANT (1)..(17): Xaa = Any Amino Acid
ACXEYCANPACXTXXGC

SEQ ID NO: 9954 - protein, 17 aa, Artificial Sequence
  Synthetically generated peptide
  VARIANT (1)..(17): Xaa = Any Amino Acid
ACXEYCANPACXTXGXC

SEQ ID NO: 9955 - protein, 16 aa, Artificial Sequence
  Synthetically generated peptide
  VARIANT (1)..(16): Xaa = Any Amino Acid
ACXEYCANPACXTGXC

SEQ ID NO: 9956 - protein, 17 aa, Artificial Sequence
  Synthetically generated peptide
  VARIANT (1)..(17): Xaa = Any Amino Acid
ACXEYCANPACXTGXXC

SEQ ID NO: 9957 - protein, 15 aa, Artificial Sequence
  Synthetically generated peptide
  VARIANT (1)..(15): Xaa = Any Amino Acid
ACXEYCANPACTXGC

SEQ ID NO: 9958 - protein, 16 aa, Artificial Sequence
  Synthetically generated peptide
  VARIANT (1)..(16): Xaa = Any Amino Acid
ACXEYCANPACTXXGC

SEQ ID NO: 9959 - protein, 17 aa, Artificial Sequence
  Synthetically generated peptide
  VARIANT (1)..(17): Xaa = Any Amino Acid
ACXEYCANPACTXXXGC

SEQ ID NO: 9960 - protein, 17 aa, Artificial Sequence
  Synthetically generated peptide
  VARIANT (1)..(17): Xaa = Any Amino Acid
ACXEYCANPACTXXGXC

SEQ ID NO: 9961 - protein, 16 aa, Artificial Sequence
  Synthetically generated peptide
  VARIANT (1)..(16): Xaa = Any Amino Acid
ACXEYCANPACTXGXC

SEQ ID NO: 9962 - protein, 17 aa, Artificial Sequence
  Synthetically generated peptide
  VARIANT (1)..(17): Xaa = Any Amino Acid
ACXEYCANPACTXGXXC

SEQ ID NO: 9963 - protein, 15 aa, Artificial Sequence
  Synthetically generated peptide
  VARIANT (1)..(15): Xaa = Any Amino Acid
ACXEYCANPACTGXC

SEQ ID NO: 9964 - protein, 16 aa, Artificial Sequence
  Synthetically generated peptide
  VARIANT (1)..(16): Xaa = Any Amino Acid
ACXEYCANPACTGXXC

SEQ ID NO: 9965 - protein, 17 aa, Artificial Sequence
  Synthetically generated peptide
  VARIANT (1)..(17): Xaa = Any Amino Acid
ACXEYCANPACTGXXXC

SEQ ID NO: 9966 - protein, 14 aa, Artificial Sequence
  Synthetically generated peptide
  VARIANT (1)..(14): Xaa = Any Amino Acid
ACEXYCANPACTGC

SEQ ID NO: 9967 - protein, 15 aa, Artificial Sequence
  Synthetically generated peptide
  VARIANT (1)..(15): Xaa = Any Amino Acid
ACEXXYCANPACTGC

SEQ ID NO: 9968 - protein, 16 aa, Artificial Sequence
  Synthetically generated peptide
  VARIANT (1)..(16): Xaa = Any Amino Acid
ACEXXXYCANPACTGC

SEQ ID NO: 9969 - protein, 17 aa, Artificial Sequence
  Synthetically generated peptide
  VARIANT (1)..(17): Xaa = Any Amino Acid
ACEXXXXYCANPACTGC

SEQ ID NO: 9970 - protein, 17 aa, Artificial Sequence
  Synthetically generated peptide
  VARIANT (1)..(17): Xaa = Any Amino Acid
ACEXXXYXCANPACTGC

SEQ ID NO: 9971 - protein, 17 aa, Artificial Sequence
  Synthetically generated peptide
  VARIANT (1)..(17): Xaa = Any Amino Acid
ACEXXXYCAXNPACTGC

SEQ ID NO: 9972 - protein, 17 aa, Artificial Sequence
  Synthetically generated peptide
  VARIANT (1)..(17): Xaa = Any Amino Acid
ACEXXXYCANXPACTGC

SEQ ID NO: 9973 - protein, 17 aa, Artificial Sequence
  Synthetically generated peptide
  VARIANT (1)..(17): Xaa = Any Amino Acid
ACEXXXYCANPXACTGC

SEQ ID NO: 9974 - protein, 17 aa, Artificial Sequence
  Synthetically generated peptide
  VARIANT (1)..(17): Xaa = Any Amino Acid
ACEXXXYCANPAXCTGC

SEQ ID NO: 9975 - protein, 17 aa, Artificial Sequence
  Synthetically generated peptide
  VARIANT (1)..(17): Xaa = Any Amino Acid
ACEXXXYCANPACXTGC

SEQ ID NO: 9976 - protein, 17 aa, Artificial Sequence
  Synthetically generated peptide
  VARIANT (1)..(17): Xaa = Any Amino Acid
ACEXXXYCANPACTXGC

SEQ ID NO: 9977 - protein, 17 aa, Artificial Sequence
  Synthetically generated peptide
  VARIANT (1)..(17): Xaa = Any Amino Acid
ACEXXXYCANPACTGXC

SEQ ID NO: 9978 - protein, 16 aa, Artificial Sequence
  Synthetically generated peptide
  VARIANT (1)..(16): Xaa = Any Amino Acid
ACEXXYXCANPACTGC

SEQ ID NO: 9979 - protein, 17 aa, Artificial Sequence
  Synthetically generated peptide
  VARIANT (1)..(17): Xaa = Any Amino Acid
ACEXXYXXCANPACTGC

SEQ ID NO: 9980 - protein, 17 aa, Artificial Sequence
  Synthetically generated peptide
  VARIANT (1)..(17): Xaa = Any Amino Acid
ACEXXYXCAXNPACTGC

SEQ ID NO: 9981 - protein, 17 aa, Artificial Sequence
  Synthetically generated peptide
  VARIANT (1)..(17): Xaa = Any Amino Acid
ACEXXYXCANXPACTGC

SEQ ID NO: 9982 - protein, 17 aa, Artificial Sequence
  Synthetically generated peptide
  VARIANT (1)..(17): Xaa = Any Amino Acid
ACEXXYXCANPXACTGC

SEQ ID NO: 9983 - protein, 17 aa, Artificial Sequence
  Synthetically generated peptide
  VARIANT (1)..(17): Xaa = Any Amino Acid
ACEXXYXCANPAXCTGC

SEQ ID NO: 9984 - protein, 17 aa, Artificial Sequence
  Synthetically generated peptide
  VARIANT (1)..(17): Xaa = Any Amino Acid
ACEXXYXCANPACXTGC

SEQ ID NO: 9985 - protein, 17 aa, Artificial Sequence
  Synthetically generated peptide
  VARIANT (1)..(17): Xaa = Any Amino Acid
ACEXXYXCANPACTXGC

SEQ ID NO: 9986 - protein, 17 aa, Artificial Sequence
  Synthetically generated peptide
  VARIANT (1)..(17): Xaa = Any Amino Acid
ACEXXYXCANPACTGXC

SEQ ID NO: 9987 - protein, 16 aa, Artificial Sequence
  Synthetically generated peptide
  VARIANT (1)..(16): Xaa = Any Amino Acid
ACEXXYCAXNPACTGC

SEQ ID NO: 9988 - protein, 17 aa, Artificial Sequence
  Synthetically generated peptide
  VARIANT (1)..(17): Xaa = Any Amino Acid
ACEXXYCAXXNPACTGC

SEQ ID NO: 9989 - protein, 17 aa, Artificial Sequence
  Synthetically generated peptide
  VARIANT (1)..(17): Xaa = Any Amino Acid
ACEXXYCAXNXPACTGC

SEQ ID NO: 9990 - protein, 17 aa, Artificial Sequence
  Synthetically generated peptide
  VARIANT (1)..(17): Xaa = Any Amino Acid
ACEXXYCAXNPXACTGC

SEQ ID NO: 9991 - protein, 17 aa, Artificial Sequence
  Synthetically generated peptide
  VARIANT (1)..(17): Xaa = Any Amino Acid
ACEXXYCAXNPAXCTGC

SEQ ID NO: 9992 - protein, 17 aa, Artificial Sequence
  Synthetically generated peptide
  VARIANT (1)..(17): Xaa = Any Amino Acid
ACEXXYCAXNPACXTGC

SEQ ID NO: 9993 - protein, 17 aa, Artificial Sequence
  Synthetically generated peptide
  VARIANT (1)..(17): Xaa = Any Amino Acid
ACEXXYCAXNPACTXGC

SEQ ID NO: 9994 - protein, 17 aa, Artificial Sequence
  Synthetically generated peptide
  VARIANT (1)..(17): Xaa = Any Amino Acid
ACEXXYCAXNPACTGXC

SEQ ID NO: 9995 - protein, 16 aa, Artificial Sequence
  Synthetically generated peptide
  VARIANT (1)..(16): Xaa = Any Amino Acid
ACEXXYCANXPACTGC

SEQ ID NO: 9996 - protein, 17 aa, Artificial Sequence
  Synthetically generated peptide
  VARIANT (1)..(17): Xaa = Any Amino Acid
ACEXXYCANXXPACTGC

SEQ ID NO: 9997 - protein, 17 aa, Artificial Sequence
  Synthetically generated peptide
  VARIANT (1)..(17): Xaa = Any Amino Acid
ACEXXYCANXPXACTGC

SEQ ID NO: 9998 - protein, 17 aa, Artificial Sequence
  Synthetically generated peptide
  VARIANT (1)..(17): Xaa = Any Amino Acid
ACEXXYCANXPAXCTGC

SEQ ID NO: 9999 - protein, 17 aa, Artificial Sequence
  Synthetically generated peptide
  VARIANT (1)..(17): Xaa = Any Amino Acid
ACEXXYCANXPACXTGC

SEQ ID NO: 10000 - protein, 17 aa, Artificial Sequence
  Synthetically generated peptide
  VARIANT (1)..(17): Xaa = Any Amino Acid
ACEXXYCANXPACTXGC

SEQ ID NO: 10001 - protein, 17 aa, Artificial Sequence
  Synthetically generated peptide
  VARIANT (1)..(17): Xaa = Any Amino Acid
ACEXXYCANXPACTGXC

SEQ ID NO: 10002 - protein, 16 aa, Artificial Sequence
  Synthetically generated peptide
  VARIANT (1)..(16): Xaa = Any Amino Acid
ACEXXYCANPXACTGC

SEQ ID NO: 10003 - protein, 17 aa, Artificial Sequence
  Synthetically generated peptide
  VARIANT (1)..(17): Xaa = Any Amino Acid
ACEXXYCANPXXACTGC

SEQ ID NO: 10004 - protein, 17 aa, Artificial Sequence
  Synthetically generated peptide
  VARIANT (1)..(17): Xaa = Any Amino Acid
ACEXXYCANPXAXCTGC

SEQ ID NO: 10005 - protein, 17 aa, Artificial Sequence
  Synthetically generated peptide
  VARIANT (1)..(17): Xaa = Any Amino Acid
ACEXXYCANPXACXTGC

SEQ ID NO: 10006 - protein, 17 aa, Artificial Sequence
  Synthetically generated peptide
  VARIANT (1)..(17): Xaa = Any Amino Acid
ACEXXYCANPXACTXGC

SEQ ID NO: 10007 - protein, 17 aa, Artificial Sequence
  Synthetically generated peptide
  VARIANT (1)..(17): Xaa = Any Amino Acid
ACEXXYCANPXACTGXC

SEQ ID NO: 10008 - protein, 16 aa, Artificial Sequence
  Synthetically generated peptide
  VARIANT (1)..(16): Xaa = Any Amino Acid
ACEXXYCANPAXCTGC

SEQ ID NO: 10009 - protein, 17 aa, Artificial Sequence
  Synthetically generated peptide
  VARIANT (1)..(17): Xaa = Any Amino Acid
ACEXXYCANPAXXCTGC

SEQ ID NO: 10010 - protein, 17 aa, Artificial Sequence
  Synthetically generated peptide
  VARIANT (1)..(17): Xaa = Any Amino Acid
ACEXXYCANPAXCXTGC

SEQ ID NO: 10011 - protein, 17 aa, Artificial Sequence
  Synthetically generated peptide
  VARIANT (1)..(17): Xaa = Any Amino Acid
ACEXXYCANPAXCTXGC

SEQ ID NO: 10012 - protein, 17 aa, Artificial Sequence
  Synthetically generated peptide
  VARIANT (1)..(17): Xaa = Any Amino Acid
ACEXXYCANPAXCTGXC

SEQ ID NO: 10013 - protein, 16 aa, Artificial Sequence
  Synthetically generated peptide
  VARIANT (1)..(16): Xaa = Any Amino Acid
ACEXXYCANPACXTGC

SEQ ID NO: 10014 - protein, 17 aa, Artificial Sequence
  Synthetically generated peptide
  VARIANT (1)..(17): Xaa = Any Amino Acid
ACEXXYCANPACXXTGC

SEQ ID NO: 10015 - protein, 17 aa, Artificial Sequence
  Synthetically generated peptide
  VARIANT (1)..(17): Xaa = Any Amino Acid
ACEXXYCANPACXTXGC

SEQ ID NO: 10016 - protein, 17 aa, Artificial Sequence
  Synthetically generated peptide
  VARIANT (1)..(17): Xaa = Any Amino Acid
ACEXXYCANPACXTGXC

SEQ ID NO: 10017 - protein, 16 aa, Artificial Sequence
  Synthetically generated peptide
  VARIANT (1)..(16): Xaa = Any Amino Acid
ACEXXYCANPACTXGC

SEQ ID NO: 10018 - protein, 17 aa, Artificial Sequence
  Synthetically generated peptide
  VARIANT (1)..(17): Xaa = Any Amino Acid
ACEXXYCANPACTXXGC

SEQ ID NO: 10019 - protein, 17 aa, Artificial Sequence
  Synthetically generated peptide
  VARIANT (1)..(17): Xaa = Any Amino Acid
ACEXXYCANPACTXGXC

SEQ ID NO: 10020 - protein, 16 aa, Artificial Sequence
  Synthetically generated peptide
  VARIANT (1)..(16): Xaa = Any Amino Acid
ACEXXYCANPACTGXC

SEQ ID NO: 10021 - protein, 17 aa, Artificial Sequence
  Synthetically generated peptide
  VARIANT (1)..(17): Xaa = Any Amino Acid
ACEXXYCANPACTGXXC

SEQ ID NO: 10022 - protein, 15 aa, Artificial Sequence
  Synthetically generated peptide
  VARIANT (1)..(15): Xaa = Any Amino Acid
ACEXYXCANPACTGC

SEQ ID NO: 10023 - protein, 16 aa, Artificial Sequence
  Synthetically generated peptide
  VARIANT (1)..(16): Xaa = Any Amino Acid
ACEXYXXCANPACTGC

SEQ ID NO: 10024 - protein, 17 aa, Artificial Sequence
  Synthetically generated peptide
  VARIANT (1)..(17): Xaa = Any Amino Acid
ACEXYXXXCANPACTGC

SEQ ID NO: 10025 - protein, 17 aa, Artificial Sequence
  Synthetically generated peptide
  VARIANT (1)..(17): Xaa = Any Amino Acid
ACEXYXXCAXNPACTGC

SEQ ID NO: 10026 - protein, 17 aa, Artificial Sequence
  Synthetically generated peptide
  VARIANT (1)..(17): Xaa = Any Amino Acid
ACEXYXXCANXPACTGC

SEQ ID NO: 10027 - protein, 17 aa, Artificial Sequence
  Synthetically generated peptide
  VARIANT (1)..(17): Xaa = Any Amino Acid
ACEXYXXCANPXACTGC

SEQ ID NO: 10028 - protein, 17 aa, Artificial Sequence
  Synthetically generated peptide
  VARIANT (1)..(17): Xaa = Any Amino Acid
ACEXYXXCANPAXCTGC

SEQ ID NO: 10029 - protein, 17 aa, Artificial Sequence
  Synthetically generated peptide
  VARIANT (1)..(17): Xaa = Any Amino Acid
ACEXYXXCANPACXTGC

SEQ ID NO: 10030 - protein, 17 aa, Artificial Sequence
  Synthetically generated peptide
  VARIANT (1)..(17): Xaa = Any Amino Acid
ACEXYXXCANPACTXGC

SEQ ID NO: 10031 - protein, 17 aa, Artificial Sequence
  Synthetically generated peptide
  VARIANT (1)..(17): Xaa = Any Amino Acid
ACEXYXXCANPACTGXC

SEQ ID NO: 10032 - protein, 16 aa, Artificial Sequence
  Synthetically generated peptide
  VARIANT (1)..(16): Xaa = Any Amino Acid
ACEXYXCAXNPACTGC

SEQ ID NO: 10033 - protein, 17 aa, Artificial Sequence
  Synthetically generated peptide
  VARIANT (1)..(17): Xaa = Any Amino Acid
ACEXYXCAXXNPACTGC

SEQ ID NO: 10034 - protein, 17 aa, Artificial Sequence
  Synthetically generated peptide
  VARIANT (1)..(17): Xaa = Any Amino Acid
ACEXYXCAXNXPACTGC

SEQ ID NO: 10035 - protein, 17 aa, Artificial Sequence
  Synthetically generated peptide
  VARIANT (1)..(17): Xaa = Any Amino Acid
ACEXYXCAXNPXACTGC

SEQ ID NO: 10036 - protein, 17 aa, Artificial Sequence
  Synthetically generated peptide
  VARIANT (1)..(17): Xaa = Any Amino Acid
ACEXYXCAXNPAXCTGC

SEQ ID NO: 10037 - protein, 17 aa, Artificial Sequence
  Synthetically generated peptide
  VARIANT (1)..(17): Xaa = Any Amino Acid
ACEXYXCAXNPACXTGC

SEQ ID NO: 10038 - protein, 17 aa, Artificial Sequence
  Synthetically generated peptide
  VARIANT (1)..(17): Xaa = Any Amino Acid
ACEXYXCAXNPACTXGC

SEQ ID NO: 10039 - protein, 17 aa, Artificial Sequence
  Synthetically generated peptide
  VARIANT (1)..(17): Xaa = Any Amino Acid
ACEXYXCAXNPACTGXC

SEQ ID NO: 10040 - protein, 16 aa, Artificial Sequence
  Synthetically generated peptide
  VARIANT (1)..(16): Xaa = Any Amino Acid
ACEXYXCANXPACTGC

SEQ ID NO: 10041 - protein, 17 aa, Artificial Sequence
  Synthetically generated peptide
  VARIANT (1)..(17): Xaa = Any Amino Acid
ACEXYXCANXXPACTGC

SEQ ID NO: 10042 - protein, 17 aa, Artificial Sequence
  Synthetically generated peptide
  VARIANT (1)..(17): Xaa = Any Amino Acid
ACEXYXCANXPXACTGC

SEQ ID NO: 10043 - protein, 17 aa, Artificial Sequence
  Synthetically generated peptide
  VARIANT (1)..(17): Xaa = Any Amino Acid
ACEXYXCANXPAXCTGC

SEQ ID NO: 10044 - protein, 17 aa, Artificial Sequence
  Synthetically generated peptide
  VARIANT (1)..(17): Xaa = Any Amino Acid
ACEXYXCANXPACXTGC

SEQ ID NO: 10045 - protein, 17 aa, Artificial Sequence
  Synthetically generated peptide
  VARIANT (1)..(17): Xaa = Any Amino Acid
ACEXYXCANXPACTXGC

SEQ ID NO: 10046 - protein, 17 aa, Artificial Sequence
  Synthetically generated peptide
  VARIANT (1)..(17): Xaa = Any Amino Acid
ACEXYXCANXPACTGXC

SEQ ID NO: 10047 - protein, 16 aa, Artificial Sequence
  Synthetically generated peptide
  VARIANT (1)..(16): Xaa = Any Amino Acid
ACEXYXCANPXACTGC

SEQ ID NO: 10048 - protein, 17 aa, Artificial Sequence
  Synthetically generated peptide
  VARIANT (1)..(17): Xaa = Any Amino Acid
ACEXYXCANPXXACTGC

SEQ ID NO: 10049 - protein, 17 aa, Artificial Sequence
  Synthetically generated peptide
  VARIANT (1)..(17): Xaa = Any Amino Acid
ACEXYXCANPXAXCTGC

SEQ ID NO: 10050 - protein, 17 aa, Artificial Sequence
  Synthetically generated peptide
  VARIANT (1)..(17): Xaa = Any Amino Acid
ACEXYXCANPXACXTGC

SEQ ID NO: 10051 - protein, 17 aa, Artificial Sequence
  Synthetically generated peptide
  VARIANT (1)..(17): Xaa = Any Amino Acid
ACEXYXCANPXACTXGC

SEQ ID NO: 10052 - protein, 17 aa, Artificial Sequence
  Synthetically generated peptide
  VARIANT (1)..(17): Xaa = Any Amino Acid
ACEXYXCANPXACTGXC

SEQ ID NO: 10053 - protein, 16 aa, Artificial Sequence
  Synthetically generated peptide
  VARIANT (1)..(16): Xaa = Any Amino Acid
ACEXYXCANPAXCTGC

SEQ ID NO: 10054 - protein, 17 aa, Artificial Sequence
  Synthetically generated peptide
  VARIANT (1)..(17): Xaa = Any Amino Acid
ACEXYXCANPAXXCTGC

SEQ ID NO: 10055 - protein, 17 aa, Artificial Sequence
  Synthetically generated peptide
  VARIANT (1)..(17): Xaa = Any Amino Acid
ACEXYXCANPAXCXTGC

SEQ ID NO: 10056 - protein, 17 aa, Artificial Sequence
  Synthetically generated peptide
  VARIANT (1)..(17): Xaa = Any Amino Acid
ACEXYXCANPAXCTXGC

SEQ ID NO: 10057 - protein, 17 aa, Artificial Sequence
  Synthetically generated peptide
  VARIANT (1)..(17): Xaa = Any Amino Acid
ACEXYXCANPAXCTGXC

SEQ ID NO: 10058 - protein, 16 aa, Artificial Sequence
  Synthetically generated peptide
  VARIANT (1)..(16): Xaa = Any Amino Acid
ACEXYXCANPACXTGC

SEQ ID NO: 10059 - protein, 17 aa, Artificial Sequence
  Synthetically generated peptide
  VARIANT (1)..(17): Xaa = Any Amino Acid
ACEXYXCANPACXXTGC

SEQ ID NO: 10060 - protein, 17 aa, Artificial Sequence
  Synthetically generated peptide
  VARIANT (1)..(17): Xaa = Any Amino Acid
ACEXYXCANPACXTXGC

SEQ ID NO: 10061 - protein, 17 aa, Artificial Sequence
  Synthetically generated peptide
  VARIANT (1)..(17): Xaa = Any Amino Acid
ACEXYXCANPACXTGXC

SEQ ID NO: 10062 - protein, 16 aa, Artificial Sequence
  Synthetically generated peptide
  VARIANT (1)..(16): Xaa = Any Amino Acid
ACEXYXCANPACTXGC

SEQ ID NO: 10063 - protein, 17 aa, Artificial Sequence
  Synthetically generated peptide
  VARIANT (1)..(17): Xaa = Any Amino Acid
ACEXYXCANPACTXXGC

SEQ ID NO: 10064 - protein, 17 aa, Artificial Sequence
  Synthetically generated peptide
  VARIANT (1)..(17): Xaa = Any Amino Acid
ACEXYXCANPACTXGXC

SEQ ID NO: 10065 - protein, 16 aa, Artificial Sequence
  Synthetically generated peptide
  VARIANT (1)..(16): Xaa = Any Amino Acid
ACEXYXCANPACTGXC

SEQ ID NO: 10066 - protein, 17 aa, Artificial Sequence
  Synthetically generated peptide
  VARIANT (1)..(17): Xaa = Any Amino Acid
ACEXYXCANPACTGXXC

SEQ ID NO: 10067 - protein, 15 aa, Artificial Sequence
  Synthetically generated peptide
  VARIANT (1)..(15): Xaa = Any Amino Acid
ACEXYCAXNPACTGC

SEQ ID NO: 10068 - protein, 16 aa, Artificial Sequence
  Synthetically generated peptide
  VARIANT (1)..(16): Xaa = Any Amino Acid
ACEXYCAXXNPACTGC

SEQ ID NO: 10069 - protein, 17 aa, Artificial Sequence
  Synthetically generated peptide
  VARIANT (1)..(17): Xaa = Any Amino Acid
ACEXYCAXXXNPACTGC

SEQ ID NO: 10070 - protein, 17 aa, Artificial Sequence
  Synthetically generated peptide
  VARIANT (1)..(17): Xaa = Any Amino Acid
ACEXYCAXXNXPACTGC

SEQ ID NO: 10071 - protein, 17 aa, Artificial Sequence
  Synthetically generated peptide
  VARIANT (1)..(17): Xaa = Any Amino Acid
ACEXYCAXXNPXACTGC

SEQ ID NO: 10072 - protein, 17 aa, Artificial Sequence
  Synthetically generated peptide
  VARIANT (1)..(17): Xaa = Any Amino Acid
ACEXYCAXXNPAXCTGC

SEQ ID NO: 10073 - protein, 17 aa, Artificial Sequence
  Synthetically generated peptide
  VARIANT (1)..(17): Xaa = Any Amino Acid
ACEXYCAXXNPACXTGC

SEQ ID NO: 10074 - protein, 17 aa, Artificial Sequence
  Synthetically generated peptide
  VARIANT (1)..(17): Xaa = Any Amino Acid
ACEXYCAXXNPACTXGC

SEQ ID NO: 10075 - protein, 17 aa, Artificial Sequence
  Synthetically generated peptide
  VARIANT (1)..(17): Xaa = Any Amino Acid
ACEXYCAXXNPACTGXC

SEQ ID NO: 10076 - protein, 16 aa, Artificial Sequence
  Synthetically generated peptide
  VARIANT (1)..(16): Xaa = Any Amino Acid
ACEXYCAXNXPACTGC

SEQ ID NO: 10077 - protein, 17 aa, Artificial Sequence
  Synthetically generated peptide
  VARIANT (1)..(17): Xaa = Any Amino Acid
ACEXYCAXNXXPACTGC

SEQ ID NO: 10078 - protein, 17 aa, Artificial Sequence
  Synthetically generated peptide
  VARIANT (1)..(17): Xaa = Any Amino Acid
ACEXYCAXNXPXACTGC

SEQ ID NO: 10079 - protein, 17 aa, Artificial Sequence
  Synthetically generated peptide
  VARIANT (1)..(17): Xaa = Any Amino Acid
ACEXYCAXNXPAXCTGC

SEQ ID NO: 10080 - protein, 17 aa, Artificial Sequence
  Synthetically generated peptide
  VARIANT (1)..(17): Xaa = Any Amino Acid
ACEXYCAXNXPACXTGC

SEQ ID NO: 10081 - protein, 17 aa, Artificial Sequence
  Synthetically generated peptide
  VARIANT (1)..(17): Xaa = Any Amino Acid
ACEXYCAXNXPACTXGC

SEQ ID NO: 10082 - protein, 17 aa, Artificial Sequence
  Synthetically generated peptide
  VARIANT (1)..(17): Xaa = Any Amino Acid
ACEXYCAXNXPACTGXC

SEQ ID NO: 10083 - protein, 16 aa, Artificial Sequence
  Synthetically generated peptide
  VARIANT (1)..(16): Xaa = Any Amino Acid
ACEXYCAXNPXACTGC

SEQ ID NO: 10084 - protein, 17 aa, Artificial Sequence
  Synthetically generated peptide
  VARIANT (1)..(17): Xaa = Any Amino Acid
ACEXYCAXNPXXACTGC

SEQ ID NO: 10085 - protein, 17 aa, Artificial Sequence
  Synthetically generated peptide
  VARIANT (1)..(17): Xaa = Any Amino Acid
ACEXYCAXNPXAXCTGC

SEQ ID NO: 10086 - protein, 17 aa, Artificial Sequence
  Synthetically generated peptide
  VARIANT (1)..(17): Xaa = Any Amino Acid
ACEXYCAXNPXACXTGC

SEQ ID NO: 10087 - protein, 17 aa, Artificial Sequence
  Synthetically generated peptide
  VARIANT (1)..(17): Xaa = Any Amino Acid
ACEXYCAXNPXACTXGC

SEQ ID NO: 10088 - protein, 17 aa, Artificial Sequence
  Synthetically generated peptide
  VARIANT (1)..(17): Xaa = Any Amino Acid
ACEXYCAXNPXACTGXC

SEQ ID NO: 10089 - protein, 16 aa, Artificial Sequence
  Synthetically generated peptide
  VARIANT (1)..(16): Xaa = Any Amino Acid
ACEXYCAXNPAXCTGC

SEQ ID NO: 10090 - protein, 17 aa, Artificial Sequence
  Synthetically generated peptide
  VARIANT (1)..(17): Xaa = Any Amino Acid
ACEXYCAXNPAXXCTGC

SEQ ID NO: 10091 - protein, 17 aa, Artificial Sequence
  Synthetically generated peptide
  VARIANT (1)..(17): Xaa = Any Amino Acid
ACEXYCAXNPAXCXTGC

SEQ ID NO: 10092 - protein, 17 aa, Artificial Sequence
  Synthetically generated peptide
  VARIANT (1)..(17): Xaa = Any Amino Acid
ACEXYCAXNPAXCTXGC

SEQ ID NO: 10093 - protein, 17 aa, Artificial Sequence
  Synthetically generated peptide
  VARIANT (1)..(17): Xaa = Any Amino Acid
ACEXYCAXNPAXCTGXC

SEQ ID NO: 10094 - protein, 16 aa, Artificial Sequence
  Synthetically generated peptide
  VARIANT (1)..(16): Xaa = Any Amino Acid
ACEXYCAXNPACXTGC

SEQ ID NO: 10095 - protein, 17 aa, Artificial Sequence
  Synthetically generated peptide
  VARIANT (1)..(17): Xaa = Any Amino Acid
ACEXYCAXNPACXXTGC

SEQ ID NO: 10096 - protein, 17 aa, Artificial Sequence
  Synthetically generated peptide
  VARIANT (1)..(17): Xaa = Any Amino Acid
ACEXYCAXNPACXTXGC

SEQ ID NO: 10097 - protein, 17 aa, Artificial Sequence
  Synthetically generated peptide
  VARIANT (1)..(17): Xaa = Any Amino Acid
ACEXYCAXNPACXTGXC

SEQ ID NO: 10098 - protein, 16 aa, Artificial Sequence
  Synthetically generated peptide
  VARIANT (1)..(16): Xaa = Any Amino Acid
ACEXYCAXNPACTXGC

SEQ ID NO: 10099 - protein, 17 aa, Artificial Sequence
  Synthetically generated peptide
  VARIANT (1)..(17): Xaa = Any Amino Acid
ACEXYCAXNPACTXXGC

SEQ ID NO: 10100 - protein, 17 aa, Artificial Sequence
  Synthetically generated peptide
  VARIANT (1)..(17): Xaa = Any Amino Acid
ACEXYCAXNPACTXGXC

SEQ ID NO: 10101 - protein, 16 aa, Artificial Sequence
  Synthetically generated peptide
  VARIANT (1)..(16): Xaa = Any Amino Acid
ACEXYCAXNPACTGXC

SEQ ID NO: 10102 - protein, 17 aa, Artificial Sequence
  Synthetically generated peptide
  VARIANT (1)..(17): Xaa = Any Amino Acid
ACEXYCAXNPACTGXXC

SEQ ID NO: 10103 - protein, 15 aa, Artificial Sequence
  Synthetically generated peptide
  VARIANT (1)..(15): Xaa = Any Amino Acid
ACEXYCANXPACTGC

SEQ ID NO: 10104 - protein, 16 aa, Artificial Sequence
  Synthetically generated peptide
  VARIANT (1)..(16): Xaa = Any Amino Acid
ACEXYCANXXPACTGC

SEQ ID NO: 10105 - protein, 17 aa, Artificial Sequence
  Synthetically generated peptide
  VARIANT (1)..(17): Xaa = Any Amino Acid
ACEXYCANXXXPACTGC

SEQ ID NO: 10106 - protein, 17 aa, Artificial Sequence
  Synthetically generated peptide
  VARIANT (1)..(17): Xaa = Any Amino Acid
ACEXYCANXXPXACTGC

SEQ ID NO: 10107 - protein, 17 aa, Artificial Sequence
  Synthetically generated peptide
  VARIANT (1)..(17): Xaa = Any Amino Acid
ACEXYCANXXPAXCTGC

SEQ ID NO: 10108 - protein, 17 aa, Artificial Sequence
  Synthetically generated peptide
  VARIANT (1)..(17): Xaa = Any Amino Acid
ACEXYCANXXPACXTGC

SEQ ID NO: 10109 - protein, 17 aa, Artificial Sequence
  Synthetically generated peptide
  VARIANT (1)..(17): Xaa = Any Amino Acid
ACEXYCANXXPACTXGC

SEQ ID NO: 10110 - protein, 17 aa, Artificial Sequence
  Synthetically generated peptide
  VARIANT (1)..(17): Xaa = Any Amino Acid
ACEXYCANXXPACTGXC

SEQ ID NO: 10111 - protein, 16 aa, Artificial Sequence
  Synthetically generated peptide
  VARIANT (1)..(16): Xaa = Any Amino Acid
ACEXYCANXPXACTGC

SEQ ID NO: 10112 - protein, 17 aa, Artificial Sequence
  Synthetically generated peptide
  VARIANT (1)..(17): Xaa = Any Amino Acid
ACEXYCANXPXXACTGC

SEQ ID NO: 10113 - protein, 17 aa, Artificial Sequence
  Synthetically generated peptide
  VARIANT (1)..(17): Xaa = Any Amino Acid
ACEXYCANXPXAXCTGC

SEQ ID NO: 10114 - protein, 17 aa, Artificial Sequence
  Synthetically generated peptide
  VARIANT (1)..(17): Xaa = Any Amino Acid
ACEXYCANXPXACXTGC

SEQ ID NO: 10115 - protein, 17 aa, Artificial Sequence
  Synthetically generated peptide
  VARIANT (1)..(17): Xaa = Any Amino Acid
ACEXYCANXPXACTXGC

SEQ ID NO: 10116 - protein, 17 aa, Artificial Sequence
  Synthetically generated peptide
  VARIANT (1)..(17): Xaa = Any Amino Acid
ACEXYCANXPXACTGXC

SEQ ID NO: 10117 - protein, 16 aa, Artificial Sequence
  Synthetically generated peptide
  VARIANT (1)..(16): Xaa = Any Amino Acid
ACEXYCANXPAXCTGC

SEQ ID NO: 10118 - protein, 17 aa, Artificial Sequence
  Synthetically generated peptide
  VARIANT (1)..(17): Xaa = Any Amino Acid
ACEXYCANXPAXXCTGC

SEQ ID NO: 10119 - protein, 17 aa, Artificial Sequence
  Synthetically generated peptide
  VARIANT (1)..(17): Xaa = Any Amino Acid
ACEXYCANXPAXCXTGC

SEQ ID NO: 10120 - protein, 17 aa, Artificial Sequence
  Synthetically generated peptide
  VARIANT (1)..(17): Xaa = Any Amino Acid
ACEXYCANXPAXCTXGC

SEQ ID NO: 10121 - protein, 17 aa, Artificial Sequence
  Synthetically generated peptide
  VARIANT (1)..(17): Xaa = Any Amino Acid
ACEXYCANXPAXCTGXC

SEQ ID NO: 10122 - protein, 16 aa, Artificial Sequence
  Synthetically generated peptide
  VARIANT (1)..(16): Xaa = Any Amino Acid
ACEXYCANXPACXTGC

SEQ ID NO: 10123 - protein, 17 aa, Artificial Sequence
  Synthetically generated peptide
  VARIANT (1)..(17): Xaa = Any Amino Acid
ACEXYCANXPACXXTGC

SEQ ID NO: 10124 - protein, 17 aa, Artificial Sequence
  Synthetically generated peptide
  VARIANT (1)..(17): Xaa = Any Amino Acid
ACEXYCANXPACXTXGC

SEQ ID NO: 10125 - protein, 17 aa, Artificial Sequence
  Synthetically generated peptide
  VARIANT (1)..(17): Xaa = Any Amino Acid
ACEXYCANXPACXTGXC

SEQ ID NO: 10126 - protein, 16 aa, Artificial Sequence
  Synthetically generated peptide
  VARIANT (1)..(16): Xaa = Any Amino Acid
ACEXYCANXPACTXGC

SEQ ID NO: 10127 - protein, 17 aa, Artificial Sequence
  Synthetically generated peptide
  VARIANT (1)..(17): Xaa = Any Amino Acid
ACEXYCANXPACTXXGC

SEQ ID NO: 10128 - protein, 17 aa, Artificial Sequence
  Synthetically generated peptide
  VARIANT (1)..(17): Xaa = Any Amino Acid
ACEXYCANXPACTXGXC

SEQ ID NO: 10129 - protein, 16 aa, Artificial Sequence
  Synthetically generated peptide
  VARIANT (1)..(16): Xaa = Any Amino Acid
ACEXYCANXPACTGXC

SEQ ID NO: 10130 - protein, 17 aa, Artificial Sequence
  Synthetically generated peptide
  VARIANT (1)..(17): Xaa = Any Amino Acid
ACEXYCANXPACTGXXC

SEQ ID NO: 10131 - protein, 15 aa, Artificial Sequence
  Synthetically generated peptide
  VARIANT (1)..(15): Xaa = Any Amino Acid
ACEXYCANPXACTGC

SEQ ID NO: 10132 - protein, 16 aa, Artificial Sequence
  Synthetically generated peptide
  VARIANT (1)..(16): Xaa = Any Amino Acid
ACEXYCANPXXACTGC

SEQ ID NO: 10133 - protein, 17 aa, Artificial Sequence
  Synthetically generated peptide
  VARIANT (1)..(17): Xaa = Any Amino Acid
ACEXYCANPXXXACTGC

SEQ ID NO: 10134 - protein, 17 aa, Artificial Sequence
  Synthetically generated peptide
  VARIANT (1)..(17): Xaa = Any Amino Acid
ACEXYCANPXXAXCTGC

SEQ ID NO: 10135 - protein, 17 aa, Artificial Sequence
  Synthetically generated peptide
  VARIANT (1)..(17): Xaa = Any Amino Acid
ACEXYCANPXXACXTGC

SEQ ID NO: 10136 - protein, 17 aa, Artificial Sequence
  Synthetically generated peptide
  VARIANT (1)..(17): Xaa = Any Amino Acid
ACEXYCANPXXACTXGC

SEQ ID NO: 10137 - protein, 17 aa, Artificial Sequence
  Synthetically generated peptide
  VARIANT (1)..(17): Xaa = Any Amino Acid
ACEXYCANPXXACTGXC

SEQ ID NO: 10138 - protein, 16 aa, Artificial Sequence
  Synthetically generated peptide
  VARIANT (1)..(16): Xaa = Any Amino Acid
ACEXYCANPXAXCTGC

SEQ ID NO: 10139 - protein, 17 aa, Artificial Sequence
  Synthetically generated peptide
  VARIANT (1)..(17): Xaa = Any Amino Acid
ACEXYCANPXAXXCTGC

SEQ ID NO: 10140 - protein, 17 aa, Artificial Sequence
  Synthetically generated peptide
  VARIANT (1)..(17): Xaa = Any Amino Acid
ACEXYCANPXAXCXTGC

SEQ ID NO: 10141 - protein, 17 aa, Artificial Sequence
  Synthetically generated peptide
  VARIANT (1)..(17): Xaa = Any Amino Acid
ACEXYCANPXAXCTXGC

SEQ ID NO: 10142 - protein, 17 aa, Artificial Sequence
  Synthetically generated peptide
  VARIANT (1)..(17): Xaa = Any Amino Acid
ACEXYCANPXAXCTGXC

SEQ ID NO: 10143 - protein, 16 aa, Artificial Sequence
  Synthetically generated peptide
  VARIANT (1)..(16): Xaa = Any Amino Acid
ACEXYCANPXACXTGC

SEQ ID NO: 10144 - protein, 17 aa, Artificial Sequence
  Synthetically generated peptide
  VARIANT (1)..(17): Xaa = Any Amino Acid
ACEXYCANPXACXXTGC

SEQ ID NO: 10145 - protein, 17 aa, Artificial Sequence
  Synthetically generated peptide
  VARIANT (1)..(17): Xaa = Any Amino Acid
ACEXYCANPXACXTXGC

SEQ ID NO: 10146 - protein, 17 aa, Artificial Sequence
  Synthetically generated peptide
  VARIANT (1)..(17): Xaa = Any Amino Acid
ACEXYCANPXACXTGXC

SEQ ID NO: 10147 - protein, 16 aa, Artificial Sequence
  Synthetically generated peptide
  VARIANT (1)..(16): Xaa = Any Amino Acid
ACEXYCANPXACTXGC

SEQ ID NO: 10148 - protein, 17 aa, Artificial Sequence
  Synthetically generated peptide
  VARIANT (1)..(17): Xaa = Any Amino Acid
ACEXYCANPXACTXXGC

SEQ ID NO: 10149 - protein, 17 aa, Artificial Sequence
  Synthetically generated peptide
  VARIANT (1)..(17): Xaa = Any Amino Acid
ACEXYCANPXACTXGXC

SEQ ID NO: 10150 - protein, 16 aa, Artificial Sequence
  Synthetically generated peptide
  VARIANT (1)..(16): Xaa = Any Amino Acid
ACEXYCANPXACTGXC

SEQ ID NO: 10151 - protein, 17 aa, Artificial Sequence
  Synthetically generated peptide
  VARIANT (1)..(17): Xaa = Any Amino Acid
ACEXYCANPXACTGXXC

SEQ ID NO: 10152 - protein, 15 aa, Artificial Sequence
  Synthetically generated peptide
  VARIANT (1)..(15): Xaa = Any Amino Acid
ACEXYCANPAXCTGC

SEQ ID NO: 10153 - protein, 16 aa, Artificial Sequence
  Synthetically generated peptide
  VARIANT (1)..(16): Xaa = Any Amino Acid
ACEXYCANPAXXCTGC

SEQ ID NO: 10154 - protein, 17 aa, Artificial Sequence
  Synthetically generated peptide
  VARIANT (1)..(17): Xaa = Any Amino Acid
ACEXYCANPAXXXCTGC

SEQ ID NO: 10155 - protein, 17 aa, Artificial Sequence
  Synthetically generated peptide
  VARIANT (1)..(17): Xaa = Any Amino Acid
ACEXYCANPAXXCXTGC

SEQ ID NO: 10156 - protein, 17 aa, Artificial Sequence
  Synthetically generated peptide
  VARIANT (1)..(17): Xaa = Any Amino Acid
ACEXYCANPAXXCTXGC

SEQ ID NO: 10157 - protein, 17 aa, Artificial Sequence
  Synthetically generated peptide
  VARIANT (1)..(17): Xaa = Any Amino Acid
ACEXYCANPAXXCTGXC

SEQ ID NO: 10158 - protein, 16 aa, Artificial Sequence
  Synthetically generated peptide
  VARIANT (1)..(16): Xaa = Any Amino Acid
ACEXYCANPAXCXTGC

SEQ ID NO: 10159 - protein, 17 aa, Artificial Sequence
  Synthetically generated peptide
  VARIANT (1)..(17): Xaa = Any Amino Acid
ACEXYCANPAXCXXTGC

SEQ ID NO: 10160 - protein, 17 aa, Artificial Sequence
  Synthetically generated peptide
  VARIANT (1)..(17): Xaa = Any Amino Acid
ACEXYCANPAXCXTXGC

SEQ ID NO: 10161 - protein, 17 aa, Artificial Sequence
  Synthetically generated peptide
  VARIANT (1)..(17): Xaa = Any Amino Acid
ACEXYCANPAXCXTGXC

SEQ ID NO: 10162 - protein, 16 aa, Artificial Sequence
  Synthetically generated peptide
  VARIANT (1)..(16): Xaa = Any Amino Acid
ACEXYCANPAXCTXGC

SEQ ID NO: 10163 - protein, 17 aa, Artificial Sequence
  Synthetically generated peptide
  VARIANT (1)..(17): Xaa = Any Amino Acid
ACEXYCANPAXCTXXGC

SEQ ID NO: 10164 - protein, 17 aa, Artificial Sequence
  Synthetically generated peptide
  VARIANT (1)..(17): Xaa = Any Amino Acid
ACEXYCANPAXCTXGXC

SEQ ID NO: 10165 - protein, 16 aa, Artificial Sequence
  Synthetically generated peptide
  VARIANT (1)..(16): Xaa = Any Amino Acid
ACEXYCANPAXCTGXC

SEQ ID NO: 10166 - protein, 17 aa, Artificial Sequence
  Synthetically generated peptide
  VARIANT (1)..(17): Xaa = Any Amino Acid
ACEXYCANPAXCTGXXC

SEQ ID NO: 10167 - protein, 15 aa, Artificial Sequence
  Synthetically generated peptide
  VARIANT (1)..(15): Xaa = Any Amino Acid
ACEXYCANPACXTGC

SEQ ID NO: 10168 - protein, 16 aa, Artificial Sequence
  Synthetically generated peptide
  VARIANT (1)..(16): Xaa = Any Amino Acid
ACEXYCANPACXXTGC

SEQ ID NO: 10169 - protein, 17 aa, Artificial Sequence
  Synthetically generated peptide
  VARIANT (1)..(17): Xaa = Any Amino Acid
ACEXYCANPACXXXTGC

SEQ ID NO: 10170 - protein, 17 aa, Artificial Sequence
  Synthetically generated peptide
  VARIANT (1)..(17): Xaa = Any Amino Acid
ACEXYCANPACXXTXGC

SEQ ID NO: 10171 - protein, 17 aa, Artificial Sequence
  Synthetically generated peptide
  VARIANT (1)..(17): Xaa = Any Amino Acid
ACEXYCANPACXXTGXC

SEQ ID NO: 10172 - protein, 16 aa, Artificial Sequence
  Synthetically generated peptide
  VARIANT (1)..(16): Xaa = Any Amino Acid
ACEXYCANPACXTXGC

SEQ ID NO: 10173 - protein, 17 aa, Artificial Sequence
  Synthetically generated peptide
  VARIANT (1)..(17): Xaa = Any Amino Acid
ACEXYCANPACXTXXGC

SEQ ID NO: 10174 - protein, 17 aa, Artificial Sequence
  Synthetically generated peptide
  VARIANT (1)..(17): Xaa = Any Amino Acid
ACEXYCANPACXTXGXC

SEQ ID NO: 10175 - protein, 16 aa, Artificial Sequence
  Synthetically generated peptide
  VARIANT (1)..(16): Xaa = Any Amino Acid
ACEXYCANPACXTGXC

SEQ ID NO: 10176 - protein, 17 aa, Artificial Sequence
  Synthetically generated peptide
  VARIANT (1)..(17): Xaa = Any Amino Acid
ACEXYCANPACXTGXXC

SEQ ID NO: 10177 - protein, 15 aa, Artificial Sequence
  Synthetically generated peptide
  VARIANT (1)..(15): Xaa = Any Amino Acid
ACEXYCANPACTXGC

SEQ ID NO: 10178 - protein, 16 aa, Artificial Sequence
  Synthetically generated peptide
  VARIANT (1)..(16): Xaa = Any Amino Acid
ACEXYCANPACTXXGC

SEQ ID NO: 10179 - protein, 17 aa, Artificial Sequence
  Synthetically generated peptide
  VARIANT (1)..(17): Xaa = Any Amino Acid
ACEXYCANPACTXXXGC

SEQ ID NO: 10180 - protein, 17 aa, Artificial Sequence
  Synthetically generated peptide
  VARIANT (1)..(17): Xaa = Any Amino Acid
ACEXYCANPACTXXGXC

SEQ ID NO: 10181 - protein, 16 aa, Artificial Sequence
  Synthetically generated peptide
  VARIANT (1)..(16): Xaa = Any Amino Acid
ACEXYCANPACTXGXC

SEQ ID NO: 10182 - protein, 17 aa, Artificial Sequence
  Synthetically generated peptide
  VARIANT (1)..(17): Xaa = Any Amino Acid
ACEXYCANPACTXGXXC

SEQ ID NO: 10183 - protein, 15 aa, Artificial Sequence
  Synthetically generated peptide
  VARIANT (1)..(15): Xaa = Any Amino Acid
ACEXYCANPACTGXC

SEQ ID NO: 10184 - protein, 16 aa, Artificial Sequence
  Synthetically generated peptide
  VARIANT (1)..(16): Xaa = Any Amino Acid
ACEXYCANPACTGXXC

SEQ ID NO: 10185 - protein, 17 aa, Artificial Sequence
  Synthetically generated peptide
  VARIANT (1)..(17): Xaa = Any Amino Acid
ACEXYCANPACTGXXXC

SEQ ID NO: 10186 - protein, 14 aa, Artificial Sequence
  Synthetically generated peptide
  VARIANT (1)..(14): Xaa = Any Amino Acid
ACEYXCANPACTGC

SEQ ID NO: 10187 - protein, 15 aa, Artificial Sequence
  Synthetically generated peptide
  VARIANT (1)..(15): Xaa = Any Amino Acid
ACEYXXCANPACTGC

SEQ ID NO: 10188 - protein, 16 aa, Artificial Sequence
  Synthetically generated peptide
  VARIANT (1)..(16): Xaa = Any Amino Acid
ACEYXXXCANPACTGC

SEQ ID NO: 10189 - protein, 17 aa, Artificial Sequence
  Synthetically generated peptide
  VARIANT (1)..(17): Xaa = Any Amino Acid
ACEYXXXXCANPACTGC

SEQ ID NO: 10190 - protein, 17 aa, Artificial Sequence
  Synthetically generated peptide
  VARIANT (1)..(17): Xaa = Any Amino Acid
ACEYXXXCAXNPACTGC

SEQ ID NO: 10191 - protein, 17 aa, Artificial Sequence
  Synthetically generated peptide
  VARIANT (1)..(17): Xaa = Any Amino Acid
ACEYXXXCANXPACTGC

SEQ ID NO: 10192 - protein, 17 aa, Artificial Sequence
  Synthetically generated peptide
  VARIANT (1)..(17): Xaa = Any Amino Acid
ACEYXXXCANPXACTGC

SEQ ID NO: 10193 - protein, 17 aa, Artificial Sequence
  Synthetically generated peptide
  VARIANT (1)..(17): Xaa = Any Amino Acid
ACEYXXXCANPAXCTGC

SEQ ID NO: 10194 - protein, 17 aa, Artificial Sequence
  Synthetically generated peptide
  VARIANT (1)..(17): Xaa = Any Amino Acid
ACEYXXXCANPACXTGC

SEQ ID NO: 10195 - protein, 17 aa, Artificial Sequence
  Synthetically generated peptide
  VARIANT (1)..(17): Xaa = Any Amino Acid
ACEYXXXCANPACTXGC

SEQ ID NO: 10196 - protein, 17 aa, Artificial Sequence
  Synthetically generated peptide
  VARIANT (1)..(17): Xaa = Any Amino Acid
ACEYXXXCANPACTGXC

SEQ ID NO: 10197 - protein, 16 aa, Artificial Sequence
  Synthetically generated peptide
  VARIANT (1)..(16): Xaa = Any Amino Acid
ACEYXXCAXNPACTGC

SEQ ID NO: 10198 - protein, 17 aa, Artificial Sequence
  Synthetically generated peptide
  VARIANT (1)..(17): Xaa = Any Amino Acid
ACEYXXCAXXNPACTGC

SEQ ID NO: 10199 - protein, 17 aa, Artificial Sequence
  Synthetically generated peptide
  VARIANT (1)..(17): Xaa = Any Amino Acid
ACEYXXCAXNXPACTGC

SEQ ID NO: 10200 - protein, 17 aa, Artificial Sequence
  Synthetically generated peptide
  VARIANT (1)..(17): Xaa = Any Amino Acid
ACEYXXCAXNPXACTGC

SEQ ID NO: 10201 - protein, 17 aa, Artificial Sequence
  Synthetically generated peptide
  VARIANT (1)..(17): Xaa = Any Amino Acid
ACEYXXCAXNPAXCTGC

SEQ ID NO: 10202 - protein, 17 aa, Artificial Sequence
  Synthetically generated peptide
  VARIANT (1)..(17): Xaa = Any Amino Acid
ACEYXXCAXNPACXTGC

SEQ ID NO: 10203 - protein, 17 aa, Artificial Sequence
  Synthetically generated peptide
  VARIANT (1)..(17): Xaa = Any Amino Acid
ACEYXXCAXNPACTXGC

SEQ ID NO: 10204 - protein, 17 aa, Artificial Sequence
  Synthetically generated peptide
  VARIANT (1)..(17): Xaa = Any Amino Acid
ACEYXXCAXNPACTGXC

SEQ ID NO: 10205 - protein, 16 aa, Artificial Sequence
  Synthetically generated peptide
  VARIANT (1)..(16): Xaa = Any Amino Acid
ACEYXXCANXPACTGC

SEQ ID NO: 10206 - protein, 17 aa, Artificial Sequence
  Synthetically generated peptide
  VARIANT (1)..(17): Xaa = Any Amino Acid
ACEYXXCANXXPACTGC

SEQ ID NO: 10207 - protein, 17 aa, Artificial Sequence
  Synthetically generated peptide
  VARIANT (1)..(17): Xaa = Any Amino Acid
ACEYXXCANXPXACTGC

SEQ ID NO: 10208 - protein, 17 aa, Artificial Sequence
  Synthetically generated peptide
  VARIANT (1)..(17): Xaa = Any Amino Acid
ACEYXXCANXPAXCTGC

SEQ ID NO: 10209 - protein, 17 aa, Artificial Sequence
  Synthetically generated peptide
  VARIANT (1)..(17): Xaa = Any Amino Acid
ACEYXXCANXPACXTGC

SEQ ID NO: 10210 - protein, 17 aa, Artificial Sequence
  Synthetically generated peptide
  VARIANT (1)..(17): Xaa = Any Amino Acid
ACEYXXCANXPACTXGC

SEQ ID NO: 10211 - protein, 17 aa, Artificial Sequence
  Synthetically generated peptide
  VARIANT (1)..(17): Xaa = Any Amino Acid
ACEYXXCANXPACTGXC

SEQ ID NO: 10212 - protein, 16 aa, Artificial Sequence
  Synthetically generated peptide
  VARIANT (1)..(16): Xaa = Any Amino Acid
ACEYXXCANPXACTGC

SEQ ID NO: 10213 - protein, 17 aa, Artificial Sequence
  Synthetically generated peptide
  VARIANT (1)..(17): Xaa = Any Amino Acid
ACEYXXCANPXXACTGC

SEQ ID NO: 10214 - protein, 17 aa, Artificial Sequence
  Synthetically generated peptide
  VARIANT (1)..(17): Xaa = Any Amino Acid
ACEYXXCANPXAXCTGC

SEQ ID NO: 10215 - protein, 17 aa, Artificial Sequence
  Synthetically generated peptide
  VARIANT (1)..(17): Xaa = Any Amino Acid
ACEYXXCANPXACXTGC

SEQ ID NO: 10216 - protein, 17 aa, Artificial Sequence
  Synthetically generated peptide
  VARIANT (1)..(17): Xaa = Any Amino Acid
ACEYXXCANPXACTXGC

SEQ ID NO: 10217 - protein, 17 aa, Artificial Sequence
  Synthetically generated peptide
  VARIANT (1)..(17): Xaa = Any Amino Acid
ACEYXXCANPXACTGXC

SEQ ID NO: 10218 - protein, 16 aa, Artificial Sequence
  Synthetically generated peptide
  VARIANT (1)..(16): Xaa = Any Amino Acid
ACEYXXCANPAXCTGC

SEQ ID NO: 10219 - protein, 17 aa, Artificial Sequence
  Synthetically generated peptide
  VARIANT (1)..(17): Xaa = Any Amino Acid
ACEYXXCANPAXXCTGC

SEQ ID NO: 10220 - protein, 17 aa, Artificial Sequence
  Synthetically generated peptide
  VARIANT (1)..(17): Xaa = Any Amino Acid
ACEYXXCANPAXCXTGC

SEQ ID NO: 10221 - protein, 17 aa, Artificial Sequence
  Synthetically generated peptide
  VARIANT (1)..(17): Xaa = Any Amino Acid
ACEYXXCANPAXCTXGC

SEQ ID NO: 10222 - protein, 17 aa, Artificial Sequence
  Synthetically generated peptide
  VARIANT (1)..(17): Xaa = Any Amino Acid
ACEYXXCANPAXCTGXC

SEQ ID NO: 10223 - protein, 16 aa, Artificial Sequence
  Synthetically generated peptide
  VARIANT (1)..(16): Xaa = Any Amino Acid
ACEYXXCANPACXTGC

SEQ ID NO: 10224 - protein, 17 aa, Artificial Sequence
  Synthetically generated peptide
  VARIANT (1)..(17): Xaa = Any Amino Acid
ACEYXXCANPACXXTGC

SEQ ID NO: 10225 - protein, 17 aa, Artificial Sequence
  Synthetically generated peptide
  VARIANT (1)..(17): Xaa = Any Amino Acid
ACEYXXCANPACXTXGC

SEQ ID NO: 10226 - protein, 17 aa, Artificial Sequence
  Synthetically generated peptide
  VARIANT (1)..(17): Xaa = Any Amino Acid
ACEYXXCANPACXTGXC

SEQ ID NO: 10227 - protein, 16 aa, Artificial Sequence
  Synthetically generated peptide
  VARIANT (1)..(16): Xaa = Any Amino Acid
ACEYXXCANPACTXGC

SEQ ID NO: 10228 - protein, 17 aa, Artificial Sequence
  Synthetically generated peptide
  VARIANT (1)..(17): Xaa = Any Amino Acid
ACEYXXCANPACTXXGC

SEQ ID NO: 10229 - protein, 17 aa, Artificial Sequence
  Synthetically generated peptide
  VARIANT (1)..(17): Xaa = Any Amino Acid
ACEYXXCANPACTXGXC

SEQ ID NO: 10230 - protein, 16 aa, Artificial Sequence
  Synthetically generated peptide
  VARIANT (1)..(16): Xaa = Any Amino Acid
ACEYXXCANPACTGXC

SEQ ID NO: 10231 - protein, 17 aa, Artificial Sequence
  Synthetically generated peptide
  VARIANT (1)..(17): Xaa = Any Amino Acid
ACEYXXCANPACTGXXC

SEQ ID NO: 10232 - protein, 15 aa, Artificial Sequence
  Synthetically generated peptide
  VARIANT (1)..(15): Xaa = Any Amino Acid
ACEYXCAXNPACTGC

SEQ ID NO: 10233 - protein, 16 aa, Artificial Sequence
  Synthetically generated peptide
  VARIANT (1)..(16): Xaa = Any Amino Acid
ACEYXCAXXNPACTGC

SEQ ID NO: 10234 - protein, 17 aa, Artificial Sequence
  Synthetically generated peptide
  VARIANT (1)..(17): Xaa = Any Amino Acid
ACEYXCAXXXNPACTGC

SEQ ID NO: 10235 - protein, 17 aa, Artificial Sequence
  Synthetically generated peptide
  VARIANT (1)..(17): Xaa = Any Amino Acid
ACEYXCAXXNXPACTGC

SEQ ID NO: 10236 - protein, 17 aa, Artificial Sequence
  Synthetically generated peptide
  VARIANT (1)..(17): Xaa = Any Amino Acid
ACEYXCAXXNPXACTGC

SEQ ID NO: 10237 - protein, 17 aa, Artificial Sequence
  Synthetically generated peptide
  VARIANT (1)..(17): Xaa = Any Amino Acid
ACEYXCAXXNPAXCTGC

SEQ ID NO: 10238 - protein, 17 aa, Artificial Sequence
  Synthetically generated peptide
  VARIANT (1)..(17): Xaa = Any Amino Acid
ACEYXCAXXNPACXTGC

SEQ ID NO: 10239 - protein, 17 aa, Artificial Sequence
  Synthetically generated peptide
  VARIANT (1)..(17): Xaa = Any Amino Acid
ACEYXCAXXNPACTXGC

SEQ ID NO: 10240 - protein, 17 aa, Artificial Sequence
  Synthetically generated peptide
  VARIANT (1)..(17): Xaa = Any Amino Acid
ACEYXCAXXNPACTGXC

SEQ ID NO: 10241 - protein, 16 aa, Artificial Sequence
  Synthetically generated peptide
  VARIANT (1)..(16): Xaa = Any Amino Acid
ACEYXCAXNXPACTGC

SEQ ID NO: 10242 - protein, 17 aa, Artificial Sequence
  Synthetically generated peptide
  VARIANT (1)..(17): Xaa = Any Amino Acid
ACEYXCAXNXXPACTGC

SEQ ID NO: 10243 - protein, 17 aa, Artificial Sequence
  Synthetically generated peptide
  VARIANT (1)..(17): Xaa = Any Amino Acid
ACEYXCAXNXPXACTGC

SEQ ID NO: 10244 - protein, 17 aa, Artificial Sequence
  Synthetically generated peptide
  VARIANT (1)..(17): Xaa = Any Amino Acid
ACEYXCAXNXPAXCTGC

SEQ ID NO: 10245 - protein, 17 aa, Artificial Sequence
  Synthetically generated peptide
  VARIANT (1)..(17): Xaa = Any Amino Acid
ACEYXCAXNXPACXTGC

SEQ ID NO: 10246 - protein, 17 aa, Artificial Sequence
  Synthetically generated peptide
  VARIANT (1)..(17): Xaa = Any Amino Acid
ACEYXCAXNXPACTXGC

SEQ ID NO: 10247 - protein, 17 aa, Artificial Sequence
  Synthetically generated peptide
  VARIANT (1)..(17): Xaa = Any Amino Acid
ACEYXCAXNXPACTGXC

SEQ ID NO: 10248 - protein, 16 aa, Artificial Sequence
  Synthetically generated peptide
  VARIANT (1)..(16): Xaa = Any Amino Acid
ACEYXCAXNPXACTGC

SEQ ID NO: 10249 - protein, 17 aa, Artificial Sequence
  Synthetically generated peptide
  VARIANT (1)..(17): Xaa = Any Amino Acid
ACEYXCAXNPXXACTGC

SEQ ID NO: 10250 - protein, 17 aa, Artificial Sequence
  Synthetically generated peptide
  VARIANT (1)..(17): Xaa = Any Amino Acid
ACEYXCAXNPXAXCTGC

SEQ ID NO: 10251 - protein, 17 aa, Artificial Sequence
  Synthetically generated peptide
  VARIANT (1)..(17): Xaa = Any Amino Acid
ACEYXCAXNPXACXTGC

SEQ ID NO: 10252 - protein, 17 aa, Artificial Sequence
  Synthetically generated peptide
  VARIANT (1)..(17): Xaa = Any Amino Acid
ACEYXCAXNPXACTXGC

SEQ ID NO: 10253 - protein, 17 aa, Artificial Sequence
  Synthetically generated peptide
  VARIANT (1)..(17): Xaa = Any Amino Acid
ACEYXCAXNPXACTGXC

SEQ ID NO: 10254 - protein, 16 aa, Artificial Sequence
  Synthetically generated peptide
  VARIANT (1)..(16): Xaa = Any Amino Acid
ACEYXCAXNPAXCTGC

SEQ ID NO: 10255 - protein, 17 aa, Artificial Sequence
  Synthetically generated peptide
  VARIANT (1)..(17): Xaa = Any Amino Acid
ACEYXCAXNPAXXCTGC

SEQ ID NO: 10256 - protein, 17 aa, Artificial Sequence
  Synthetically generated peptide
  VARIANT (1)..(17): Xaa = Any Amino Acid
ACEYXCAXNPAXCXTGC

SEQ ID NO: 10257 - protein, 17 aa, Artificial Sequence
  Synthetically generated peptide
  VARIANT (1)..(17): Xaa = Any Amino Acid
ACEYXCAXNPAXCTXGC

SEQ ID NO: 10258 - protein, 17 aa, Artificial Sequence
  Synthetically generated peptide
  VARIANT (1)..(17): Xaa = Any Amino Acid
ACEYXCAXNPAXCTGXC

SEQ ID NO: 10259 - protein, 16 aa, Artificial Sequence
  Synthetically generated peptide
  VARIANT (1)..(16): Xaa = Any Amino Acid
ACEYXCAXNPACXTGC

SEQ ID NO: 10260 - protein, 17 aa, Artificial Sequence
  Synthetically generated peptide
  VARIANT (1)..(17): Xaa = Any Amino Acid
ACEYXCAXNPACXXTGC

SEQ ID NO: 10261 - protein, 17 aa, Artificial Sequence
  Synthetically generated peptide
  VARIANT (1)..(17): Xaa = Any Amino Acid
ACEYXCAXNPACXTXGC

SEQ ID NO: 10262 - protein, 17 aa, Artificial Sequence
  Synthetically generated peptide
  VARIANT (1)..(17): Xaa = Any Amino Acid
ACEYXCAXNPACXTGXC

SEQ ID NO: 10263 - protein, 16 aa, Artificial Sequence
  Synthetically generated peptide
  VARIANT (1)..(16): Xaa = Any Amino Acid
ACEYXCAXNPACTXGC

SEQ ID NO: 10264 - protein, 17 aa, Artificial Sequence
  Synthetically generated peptide
  VARIANT (1)..(17): Xaa = Any Amino Acid
ACEYXCAXNPACTXXGC

SEQ ID NO: 10265 - protein, 17 aa, Artificial Sequence
  Synthetically generated peptide
  VARIANT (1)..(17): Xaa = Any Amino Acid
ACEYXCAXNPACTXGXC

SEQ ID NO: 10266 - protein, 16 aa, Artificial Sequence
  Synthetically generated peptide
  VARIANT (1)..(16): Xaa = Any Amino Acid
ACEYXCAXNPACTGXC

SEQ ID NO: 10267 - protein, 17 aa, Artificial Sequence
  Synthetically generated peptide
  VARIANT (1)..(17): Xaa = Any Amino Acid
ACEYXCAXNPACTGXXC

SEQ ID NO: 10268 - protein, 15 aa, Artificial Sequence
  Synthetically generated peptide
  VARIANT (1)..(15): Xaa = Any Amino Acid
ACEYXCANXPACTGC

SEQ ID NO: 10269 - protein, 16 aa, Artificial Sequence
  Synthetically generated peptide
  VARIANT (1)..(16): Xaa = Any Amino Acid
ACEYXCANXXPACTGC

SEQ ID NO: 10270 - protein, 17 aa, Artificial Sequence
  Synthetically generated peptide
  VARIANT (1)..(17): Xaa = Any Amino Acid
ACEYXCANXXXPACTGC

SEQ ID NO: 10271 - protein, 17 aa, Artificial Sequence
  Synthetically generated peptide
  VARIANT (1)..(17): Xaa = Any Amino Acid
ACEYXCANXXPXACTGC

SEQ ID NO: 10272 - protein, 17 aa, Artificial Sequence
  Synthetically generated peptide
  VARIANT (1)..(17): Xaa = Any Amino Acid
ACEYXCANXXPAXCTGC

SEQ ID NO: 10273 - protein, 17 aa, Artificial Sequence
  Synthetically generated peptide
  VARIANT (1)..(17): Xaa = Any Amino Acid
ACEYXCANXXPACXTGC

SEQ ID NO: 10274 - protein, 17 aa, Artificial Sequence
  Synthetically generated peptide
  VARIANT (1)..(17): Xaa = Any Amino Acid
ACEYXCANXXPACTXGC

SEQ ID NO: 10275 - protein, 17 aa, Artificial Sequence
  Synthetically generated peptide
  VARIANT (1)..(17): Xaa = Any Amino Acid
ACEYXCANXXPACTGXC

SEQ ID NO: 10276 - protein, 16 aa, Artificial Sequence
  Synthetically generated peptide
  VARIANT (1)..(16): Xaa = Any Amino Acid
ACEYXCANXPXACTGC

SEQ ID NO: 10277 - protein, 17 aa, Artificial Sequence
  Synthetically generated peptide
  VARIANT (1)..(17): Xaa = Any Amino Acid
ACEYXCANXPXXACTGC

SEQ ID NO: 10278 - protein, 17 aa, Artificial Sequence
  Synthetically generated peptide
  VARIANT (1)..(17): Xaa = Any Amino Acid
ACEYXCANXPXAXCTGC

SEQ ID NO: 10279 - protein, 17 aa, Artificial Sequence
  Synthetically generated peptide
  VARIANT (1)..(17): Xaa = Any Amino Acid
ACEYXCANXPXACXTGC

SEQ ID NO: 10280 - protein, 17 aa, Artificial Sequence
  Synthetically generated peptide
  VARIANT (1)..(17): Xaa = Any Amino Acid
ACEYXCANXPXACTXGC

SEQ ID NO: 10281 - protein, 17 aa, Artificial Sequence
  Synthetically generated peptide
  VARIANT (1)..(17): Xaa = Any Amino Acid
ACEYXCANXPXACTGXC

SEQ ID NO: 10282 - protein, 16 aa, Artificial Sequence
  Synthetically generated peptide
  VARIANT (1)..(16): Xaa = Any Amino Acid
ACEYXCANXPAXCTGC

SEQ ID NO: 10283 - protein, 17 aa, Artificial Sequence
  Synthetically generated peptide
  VARIANT (1)..(17): Xaa = Any Amino Acid
ACEYXCANXPAXXCTGC

SEQ ID NO: 10284 - protein, 17 aa, Artificial Sequence
  Synthetically generated peptide
  VARIANT (1)..(17): Xaa = Any Amino Acid
ACEYXCANXPAXCXTGC

SEQ ID NO: 10285 - protein, 17 aa, Artificial Sequence
  Synthetically generated peptide
  VARIANT (1)..(17): Xaa = Any Amino Acid
ACEYXCANXPAXCTXGC

SEQ ID NO: 10286 - protein, 17 aa, Artificial Sequence
  Synthetically generated peptide
  VARIANT (1)..(17): Xaa = Any Amino Acid
ACEYXCANXPAXCTGXC

SEQ ID NO: 10287 - protein, 16 aa, Artificial Sequence
  Synthetically generated peptide
  VARIANT (1)..(16): Xaa = Any Amino Acid
ACEYXCANXPACXTGC

SEQ ID NO: 10288 - protein, 17 aa, Artificial Sequence
  Synthetically generated peptide
  VARIANT (1)..(17): Xaa = Any Amino Acid
ACEYXCANXPACXXTGC

SEQ ID NO: 10289 - protein, 17 aa, Artificial Sequence
  Synthetically generated peptide
  VARIANT (1)..(17): Xaa = Any Amino Acid
ACEYXCANXPACXTXGC

SEQ ID NO: 10290 - protein, 17 aa, Artificial Sequence
  Synthetically generated peptide
  VARIANT (1)..(17): Xaa = Any Amino Acid
ACEYXCANXPACXTGXC

SEQ ID NO: 10291 - protein, 16 aa, Artificial Sequence
  Synthetically generated peptide
  VARIANT (1)..(16): Xaa = Any Amino Acid
ACEYXCANXPACTXGC

SEQ ID NO: 10292 - protein, 17 aa, Artificial Sequence
  Synthetically generated peptide
  VARIANT (1)..(17): Xaa = Any Amino Acid
ACEYXCANXPACTXXGC

SEQ ID NO: 10293 - protein, 17 aa, Artificial Sequence
  Synthetically generated peptide
  VARIANT (1)..(17): Xaa = Any Amino Acid
ACEYXCANXPACTXGXC

SEQ ID NO: 10294 - protein, 16 aa, Artificial Sequence
  Synthetically generated peptide
  VARIANT (1)..(16): Xaa = Any Amino Acid
ACEYXCANXPACTGXC

SEQ ID NO: 10295 - protein, 17 aa, Artificial Sequence
  Synthetically generated peptide
  VARIANT (1)..(17): Xaa = Any Amino Acid
ACEYXCANXPACTGXXC

SEQ ID NO: 10296 - protein, 15 aa, Artificial Sequence
  Synthetically generated peptide
  VARIANT (1)..(15): Xaa = Any Amino Acid
ACEYXCANPXACTGC

SEQ ID NO: 10297 - protein, 16 aa, Artificial Sequence
  Synthetically generated peptide
  VARIANT (1)..(16): Xaa = Any Amino Acid
ACEYXCANPXXACTGC

SEQ ID NO: 10298 - protein, 17 aa, Artificial Sequence
  Synthetically generated peptide
  VARIANT (1)..(17): Xaa = Any Amino Acid
ACEYXCANPXXXACTGC

SEQ ID NO: 10299 - protein, 17 aa, Artificial Sequence
  Synthetically generated peptide
  VARIANT (1)..(17): Xaa = Any Amino Acid
ACEYXCANPXXAXCTGC

SEQ ID NO: 10300 - protein, 17 aa, Artificial Sequence
  Synthetically generated peptide
  VARIANT (1)..(17): Xaa = Any Amino Acid
ACEYXCANPXXACXTGC

SEQ ID NO: 10301 - protein, 17 aa, Artificial Sequence
  Synthetically generated peptide
  VARIANT (1)..(17): Xaa = Any Amino Acid
ACEYXCANPXXACTXGC

SEQ ID NO: 10302 - protein, 17 aa, Artificial Sequence
  Synthetically generated peptide
  VARIANT (1)..(17): Xaa = Any Amino Acid
ACEYXCANPXXACTGXC

SEQ ID NO: 10303 - protein, 16 aa, Artificial Sequence
  Synthetically generated peptide
  VARIANT (1)..(16): Xaa = Any Amino Acid
ACEYXCANPXAXCTGC

SEQ ID NO: 10304 - protein, 17 aa, Artificial Sequence
  Synthetically generated peptide
  VARIANT (1)..(17): Xaa = Any Amino Acid
ACEYXCANPXAXXCTGC

SEQ ID NO: 10305 - protein, 17 aa, Artificial Sequence
  Synthetically generated peptide
  VARIANT (1)..(17): Xaa = Any Amino Acid
ACEYXCANPXAXCXTGC

SEQ ID NO: 10306 - protein, 17 aa, Artificial Sequence
  Synthetically generated peptide
  VARIANT (1)..(17): Xaa = Any Amino Acid
ACEYXCANPXAXCTXGC

SEQ ID NO: 10307 - protein, 17 aa, Artificial Sequence
  Synthetically generated peptide
  VARIANT (1)..(17): Xaa = Any Amino Acid
ACEYXCANPXAXCTGXC

SEQ ID NO: 10308 - protein, 16 aa, Artificial Sequence
  Synthetically generated peptide
  VARIANT (1)..(16): Xaa = Any Amino Acid
ACEYXCANPXACXTGC

SEQ ID NO: 10309 - protein, 17 aa, Artificial Sequence
  Synthetically generated peptide
  VARIANT (1)..(17): Xaa = Any Amino Acid
ACEYXCANPXACXXTGC

SEQ ID NO: 10310 - protein, 17 aa, Artificial Sequence
  Synthetically generated peptide
  VARIANT (1)..(17): Xaa = Any Amino Acid
ACEYXCANPXACXTXGC

SEQ ID NO: 10311 - protein, 17 aa, Artificial Sequence
  Synthetically generated peptide
  VARIANT (1)..(17): Xaa = Any Amino Acid
ACEYXCANPXACXTGXC

SEQ ID NO: 10312 - protein, 16 aa, Artificial Sequence
  Synthetically generated peptide
  VARIANT (1)..(16): Xaa = Any Amino Acid
ACEYXCANPXACTXGC

SEQ ID NO: 10313 - protein, 17 aa, Artificial Sequence
  Synthetically generated peptide
  VARIANT (1)..(17): Xaa = Any Amino Acid
ACEYXCANPXACTXXGC

SEQ ID NO: 10314 - protein, 17 aa, Artificial Sequence
  Synthetically generated peptide
  VARIANT (1)..(17): Xaa = Any Amino Acid
ACEYXCANPXACTXGXC

SEQ ID NO: 10315 - protein, 16 aa, Artificial Sequence
  Synthetically generated peptide
  VARIANT (1)..(16): Xaa = Any Amino Acid
ACEYXCANPXACTGXC

SEQ ID NO: 10316 - protein, 17 aa, Artificial Sequence
  Synthetically generated peptide
  VARIANT (1)..(17): Xaa = Any Amino Acid
ACEYXCANPXACTGXXC

SEQ ID NO: 10317 - protein, 15 aa, Artificial Sequence
  Synthetically generated peptide
  VARIANT (1)..(15): Xaa = Any Amino Acid
ACEYXCANPAXCTGC

SEQ ID NO: 10318 - protein, 16 aa, Artificial Sequence
  Synthetically generated peptide
  VARIANT (1)..(16): Xaa = Any Amino Acid
ACEYXCANPAXXCTGC

SEQ ID NO: 10319 - protein, 17 aa, Artificial Sequence
  Synthetically generated peptide
  VARIANT (1)..(17): Xaa = Any Amino Acid
ACEYXCANPAXXXCTGC

SEQ ID NO: 10320 - protein, 17 aa, Artificial Sequence
  Synthetically generated peptide
  VARIANT (1)..(17): Xaa = Any Amino Acid
ACEYXCANPAXXCXTGC

SEQ ID NO: 10321 - protein, 17 aa, Artificial Sequence
  Synthetically generated peptide
  VARIANT (1)..(17): Xaa = Any Amino Acid
ACEYXCANPAXXCTXGC

SEQ ID NO: 10322 - protein, 17 aa, Artificial Sequence
  Synthetically generated peptide
  VARIANT (1)..(17): Xaa = Any Amino Acid
ACEYXCANPAXXCTGXC

SEQ ID NO: 10323 - protein, 16 aa, Artificial Sequence
  Synthetically generated peptide
  VARIANT (1)..(16): Xaa = Any Amino Acid
ACEYXCANPAXCXTGC

SEQ ID NO: 10324 - protein, 17 aa, Artificial Sequence
  Synthetically generated peptide
  VARIANT (1)..(17): Xaa = Any Amino Acid
ACEYXCANPAXCXXTGC

SEQ ID NO: 10325 - protein, 17 aa, Artificial Sequence
  Synthetically generated peptide
  VARIANT (1)..(17): Xaa = Any Amino Acid
ACEYXCANPAXCXTXGC

SEQ ID NO: 10326 - protein, 17 aa, Artificial Sequence
  Synthetically generated peptide
  VARIANT (1)..(17): Xaa = Any Amino Acid
ACEYXCANPAXCXTGXC

SEQ ID NO: 10327 - protein, 16 aa, Artificial Sequence
  Synthetically generated peptide
  VARIANT (1)..(16): Xaa = Any Amino Acid
ACEYXCANPAXCTXGC

SEQ ID NO: 10328 - protein, 17 aa, Artificial Sequence
  Synthetically generated peptide
  VARIANT (1)..(17): Xaa = Any Amino Acid
ACEYXCANPAXCTXXGC

SEQ ID NO: 10329 - protein, 17 aa, Artificial Sequence
  Synthetically generated peptide
  VARIANT (1)..(17): Xaa = Any Amino Acid
ACEYXCANPAXCTXGXC

SEQ ID NO: 10330 - protein, 16 aa, Artificial Sequence
  Synthetically generated peptide
  VARIANT (1)..(16): Xaa = Any Amino Acid
ACEYXCANPAXCTGXC

SEQ ID NO: 10331 - protein, 17 aa, Artificial Sequence
  Synthetically generated peptide
  VARIANT (1)..(17): Xaa = Any Amino Acid
ACEYXCANPAXCTGXXC

SEQ ID NO: 10332 - protein, 15 aa, Artificial Sequence
  Synthetically generated peptide
  VARIANT (1)..(15): Xaa = Any Amino Acid
ACEYXCANPACXTGC

SEQ ID NO: 10333 - protein, 16 aa, Artificial Sequence
  Synthetically generated peptide
  VARIANT (1)..(16): Xaa = Any Amino Acid
ACEYXCANPACXXTGC

SEQ ID NO: 10334 - protein, 17 aa, Artificial Sequence
  Synthetically generated peptide
  VARIANT (1)..(17): Xaa = Any Amino Acid
ACEYXCANPACXXXTGC

SEQ ID NO: 10335 - protein, 17 aa, Artificial Sequence
  Synthetically generated peptide
  VARIANT (1)..(17): Xaa = Any Amino Acid
ACEYXCANPACXXTXGC

SEQ ID NO: 10336 - protein, 17 aa, Artificial Sequence
  Synthetically generated peptide
  VARIANT (1)..(17): Xaa = Any Amino Acid
ACEYXCANPACXXTGXC

SEQ ID NO: 10337 - protein, 16 aa, Artificial Sequence
  Synthetically generated peptide
  VARIANT (1)..(16): Xaa = Any Amino Acid
ACEYXCANPACXTXGC

SEQ ID NO: 10338 - protein, 17 aa, Artificial Sequence
  Synthetically generated peptide
  VARIANT (1)..(17): Xaa = Any Amino Acid
ACEYXCANPACXTXXGC

SEQ ID NO: 10339 - protein, 17 aa, Artificial Sequence
  Synthetically generated peptide
  VARIANT (1)..(17): Xaa = Any Amino Acid
ACEYXCANPACXTXGXC

SEQ ID NO: 10340 - protein, 16 aa, Artificial Sequence
  Synthetically generated peptide
  VARIANT (1)..(16): Xaa = Any Amino Acid
ACEYXCANPACXTGXC

SEQ ID NO: 10341 - protein, 17 aa, Artificial Sequence
  Synthetically generated peptide
  VARIANT (1)..(17): Xaa = Any Amino Acid
ACEYXCANPACXTGXXC

SEQ ID NO: 10342 - protein, 15 aa, Artificial Sequence
  Synthetically generated peptide
  VARIANT (1)..(15): Xaa = Any Amino Acid
ACEYXCANPACTXGC

SEQ ID NO: 10343 - protein, 16 aa, Artificial Sequence
  Synthetically generated peptide
  VARIANT (1)..(16): Xaa = Any Amino Acid
ACEYXCANPACTXXGC

SEQ ID NO: 10344 - protein, 17 aa, Artificial Sequence
  Synthetically generated peptide
  VARIANT (1)..(17): Xaa = Any Amino Acid
ACEYXCANPACTXXXGC

SEQ ID NO: 10345 - protein, 17 aa, Artificial Sequence
  Synthetically generated peptide
  VARIANT (1)..(17): Xaa = Any Amino Acid
ACEYXCANPACTXXGXC

SEQ ID NO: 10346 - protein, 16 aa, Artificial Sequence
  Synthetically generated peptide
  VARIANT (1)..(16): Xaa = Any Amino Acid
ACEYXCANPACTXGXC

SEQ ID NO: 10347 - protein, 17 aa, Artificial Sequence
  Synthetically generated peptide
  VARIANT (1)..(17): Xaa = Any Amino Acid
ACEYXCANPACTXGXXC

SEQ ID NO: 10348 - protein, 15 aa, Artificial Sequence
  Synthetically generated peptide
  VARIANT (1)..(15): Xaa = Any Amino Acid
ACEYXCANPACTGXC

SEQ ID NO: 10349 - protein, 16 aa, Artificial Sequence
  Synthetically generated peptide
  VARIANT (1)..(16): Xaa = Any Amino Acid
ACEYXCANPACTGXXC

SEQ ID NO: 10350 - protein, 17 aa, Artificial Sequence
  Synthetically generated peptide
  VARIANT (1)..(17): Xaa = Any Amino Acid
ACEYXCANPACTGXXXC

SEQ ID NO: 10351 - protein, 14 aa, Artificial Sequence
  Synthetically generated peptide
  VARIANT (1)..(14): Xaa = Any Amino Acid
ACEYCAXNPACTGC

SEQ ID NO: 10352 - protein, 15 aa, Artificial Sequence
  Synthetically generated peptide
  VARIANT (1)..(15): Xaa = Any Amino Acid
ACEYCAXXNPACTGC

SEQ ID NO: 10353 - protein, 16 aa, Artificial Sequence
  Synthetically generated peptide
  VARIANT (1)..(16): Xaa = Any Amino Acid
ACEYCAXXXNPACTGC

SEQ ID NO: 10354 - protein, 17 aa, Artificial Sequence
  Synthetically generated peptide
  VARIANT (1)..(17): Xaa = Any Amino Acid
ACEYCAXXXXNPACTGC

SEQ ID NO: 10355 - protein, 17 aa, Artificial Sequence
  Synthetically generated peptide
  VARIANT (1)..(17): Xaa = Any Amino Acid
ACEYCAXXXNXPACTGC

SEQ ID NO: 10356 - protein, 17 aa, Artificial Sequence
  Synthetically generated peptide
  VARIANT (1)..(17): Xaa = Any Amino Acid
ACEYCAXXXNPXACTGC

SEQ ID NO: 10357 - protein, 17 aa, Artificial Sequence
  Synthetically generated peptide
  VARIANT (1)..(17): Xaa = Any Amino Acid
ACEYCAXXXNPAXCTGC

SEQ ID NO: 10358 - protein, 17 aa, Artificial Sequence
  Synthetically generated peptide
  VARIANT (1)..(17): Xaa = Any Amino Acid
ACEYCAXXXNPACXTGC

SEQ ID NO: 10359 - protein, 17 aa, Artificial Sequence
  Synthetically generated peptide
  VARIANT (1)..(17): Xaa = Any Amino Acid
ACEYCAXXXNPACTXGC

SEQ ID NO: 10360 - protein, 17 aa, Artificial Sequence
  Synthetically generated peptide
  VARIANT (1)..(17): Xaa = Any Amino Acid
ACEYCAXXXNPACTGXC

SEQ ID NO: 10361 - protein, 16 aa, Artificial Sequence
  Synthetically generated peptide
  VARIANT (1)..(16): Xaa = Any Amino Acid
ACEYCAXXNXPACTGC

SEQ ID NO: 10362 - protein, 17 aa, Artificial Sequence
  Synthetically generated peptide
  VARIANT (1)..(17): Xaa = Any Amino Acid
ACEYCAXXNXXPACTGC

SEQ ID NO: 10363 - protein, 17 aa, Artificial Sequence
  Synthetically generated peptide
  VARIANT (1)..(17): Xaa = Any Amino Acid
ACEYCAXXNXPXACTGC

SEQ ID NO: 10364 - protein, 17 aa, Artificial Sequence
  Synthetically generated peptide
  VARIANT (1)..(17): Xaa = Any Amino Acid
ACEYCAXXNXPAXCTGC

SEQ ID NO: 10365 - protein, 17 aa, Artificial Sequence
  Synthetically generated peptide
  VARIANT (1)..(17): Xaa = Any Amino Acid
ACEYCAXXNXPACXTGC

SEQ ID NO: 10366 - protein, 17 aa, Artificial Sequence
  Synthetically generated peptide
  VARIANT (1)..(17): Xaa = Any Amino Acid
ACEYCAXXNXPACTXGC

SEQ ID NO: 10367 - protein, 17 aa, Artificial Sequence
  Synthetically generated peptide
  VARIANT (1)..(17): Xaa = Any Amino Acid
ACEYCAXXNXPACTGXC

SEQ ID NO: 10368 - protein, 16 aa, Artificial Sequence
  Synthetically generated peptide
  VARIANT (1)..(16): Xaa = Any Amino Acid
ACEYCAXXNPXACTGC

SEQ ID NO: 10369 - protein, 17 aa, Artificial Sequence
  Synthetically generated peptide
  VARIANT (1)..(17): Xaa = Any Amino Acid
ACEYCAXXNPXXACTGC

SEQ ID NO: 10370 - protein, 17 aa, Artificial Sequence
  Synthetically generated peptide
  VARIANT (1)..(17): Xaa = Any Amino Acid
ACEYCAXXNPXAXCTGC

SEQ ID NO: 10371 - protein, 17 aa, Artificial Sequence
  Synthetically generated peptide
  VARIANT (1)..(17): Xaa = Any Amino Acid
ACEYCAXXNPXACXTGC

SEQ ID NO: 10372 - protein, 17 aa, Artificial Sequence
  Synthetically generated peptide
  VARIANT (1)..(17): Xaa = Any Amino Acid
ACEYCAXXNPXACTXGC

SEQ ID NO: 10373 - protein, 17 aa, Artificial Sequence
  Synthetically generated peptide
  VARIANT (1)..(17): Xaa = Any Amino Acid
ACEYCAXXNPXACTGXC

SEQ ID NO: 10374 - protein, 16 aa, Artificial Sequence
  Synthetically generated peptide
  VARIANT (1)..(16): Xaa = Any Amino Acid
ACEYCAXXNPAXCTGC

SEQ ID NO: 10375 - protein, 17 aa, Artificial Sequence
  Synthetically generated peptide
  VARIANT (1)..(17): Xaa = Any Amino Acid
ACEYCAXXNPAXXCTGC

SEQ ID NO: 10376 - protein, 17 aa, Artificial Sequence
  Synthetically generated peptide
  VARIANT (1)..(17): Xaa = Any Amino Acid
ACEYCAXXNPAXCXTGC

SEQ ID NO: 10377 - protein, 17 aa, Artificial Sequence
  Synthetically generated peptide
  VARIANT (1)..(17): Xaa = Any Amino Acid
ACEYCAXXNPAXCTXGC

SEQ ID NO: 10378 - protein, 17 aa, Artificial Sequence
  Synthetically generated peptide
  VARIANT (1)..(17): Xaa = Any Amino Acid
ACEYCAXXNPAXCTGXC

SEQ ID NO: 10379 - protein, 16 aa, Artificial Sequence
  Synthetically generated peptide
  VARIANT (1)..(16): Xaa = Any Amino Acid
ACEYCAXXNPACXTGC

SEQ ID NO: 10380 - protein, 17 aa, Artificial Sequence
  Synthetically generated peptide
  VARIANT (1)..(17): Xaa = Any Amino Acid
ACEYCAXXNPACXXTGC

SEQ ID NO: 10381 - protein, 17 aa, Artificial Sequence
  Synthetically generated peptide
  VARIANT (1)..(17): Xaa = Any Amino Acid
ACEYCAXXNPACXTXGC

SEQ ID NO: 10382 - protein, 17 aa, Artificial Sequence
  Synthetically generated peptide
  VARIANT (1)..(17): Xaa = Any Amino Acid
ACEYCAXXNPACXTGXC

SEQ ID NO: 10383 - protein, 16 aa, Artificial Sequence
  Synthetically generated peptide
  VARIANT (1)..(16): Xaa = Any Amino Acid
ACEYCAXXNPACTXGC

SEQ ID NO: 10384 - protein, 17 aa, Artificial Sequence
  Synthetically generated peptide
  VARIANT (1)..(17): Xaa = Any Amino Acid
ACEYCAXXNPACTXXGC

SEQ ID NO: 10385 - protein, 17 aa, Artificial Sequence
  Synthetically generated peptide
  VARIANT (1)..(17): Xaa = Any Amino Acid
ACEYCAXXNPACTXGXC

SEQ ID NO: 10386 - protein, 16 aa, Artificial Sequence
  Synthetically generated peptide
  VARIANT (1)..(16): Xaa = Any Amino Acid
ACEYCAXXNPACTGXC

SEQ ID NO: 10387 - protein, 17 aa, Artificial Sequence
  Synthetically generated peptide
  VARIANT (1)..(17): Xaa = Any Amino Acid
ACEYCAXXNPACTGXXC

SEQ ID NO: 10388 - protein, 15 aa, Artificial Sequence
  Synthetically generated peptide
  VARIANT (1)..(15): Xaa = Any Amino Acid
ACEYCAXNXPACTGC

SEQ ID NO: 10389 - protein, 16 aa, Artificial Sequence
  Synthetically generated peptide
  VARIANT (1)..(16): Xaa = Any Amino Acid
ACEYCAXNXXPACTGC

SEQ ID NO: 10390 - protein, 17 aa, Artificial Sequence
  Synthetically generated peptide
  VARIANT (1)..(17): Xaa = Any Amino Acid
ACEYCAXNXXXPACTGC

SEQ ID NO: 10391 - protein, 17 aa, Artificial Sequence
  Synthetically generated peptide
  VARIANT (1)..(17): Xaa = Any Amino Acid
ACEYCAXNXXPXACTGC

SEQ ID NO: 10392 - protein, 17 aa, Artificial Sequence
  Synthetically generated peptide
  VARIANT (1)..(17): Xaa = Any Amino Acid
ACEYCAXNXXPAXCTGC

SEQ ID NO: 10393 - protein, 17 aa, Artificial Sequence
  Synthetically generated peptide
  VARIANT (1)..(17): Xaa = Any Amino Acid
ACEYCAXNXXPACXTGC

SEQ ID NO: 10394 - protein, 17 aa, Artificial Sequence
  Synthetically generated peptide
  VARIANT (1)..(17): Xaa = Any Amino Acid
ACEYCAXNXXPACTXGC

SEQ ID NO: 10395 - protein, 17 aa, Artificial Sequence
  Synthetically generated peptide
  VARIANT (1)..(17): Xaa = Any Amino Acid
ACEYCAXNXXPACTGXC

SEQ ID NO: 10396 - protein, 16 aa, Artificial Sequence
  Synthetically generated peptide
  VARIANT (1)..(16): Xaa = Any Amino Acid
ACEYCAXNXPXACTGC

SEQ ID NO: 10397 - protein, 17 aa, Artificial Sequence
  Synthetically generated peptide
  VARIANT (1)..(17): Xaa = Any Amino Acid
ACEYCAXNXPXXACTGC

SEQ ID NO: 10398 - protein, 17 aa, Artificial Sequence
  Synthetically generated peptide
  VARIANT (1)..(17): Xaa = Any Amino Acid
ACEYCAXNXPXAXCTGC

SEQ ID NO: 10399 - protein, 17 aa, Artificial Sequence
  Synthetically generated peptide
  VARIANT (1)..(17): Xaa = Any Amino Acid
ACEYCAXNXPXACXTGC

SEQ ID NO: 10400 - protein, 17 aa, Artificial Sequence
  Synthetically generated peptide
  VARIANT (1)..(17): Xaa = Any Amino Acid
ACEYCAXNXPXACTXGC

SEQ ID NO: 10401 - protein, 17 aa, Artificial Sequence
  Synthetically generated peptide
  VARIANT (1)..(17): Xaa = Any Amino Acid
ACEYCAXNXPXACTGXC

SEQ ID NO: 10402 - protein, 16 aa, Artificial Sequence
  Synthetically generated peptide
  VARIANT (1)..(16): Xaa = Any Amino Acid
ACEYCAXNXPAXCTGC

SEQ ID NO: 10403 - protein, 17 aa, Artificial Sequence
  Synthetically generated peptide
  VARIANT (1)..(17): Xaa = Any Amino Acid
ACEYCAXNXPAXXCTGC

SEQ ID NO: 10404 - protein, 17 aa, Artificial Sequence
  Synthetically generated peptide
  VARIANT (1)..(17): Xaa = Any Amino Acid
ACEYCAXNXPAXCXTGC

SEQ ID NO: 10405 - protein, 17 aa, Artificial Sequence
  Synthetically generated peptide
  VARIANT (1)..(17): Xaa = Any Amino Acid
ACEYCAXNXPAXCTXGC

SEQ ID NO: 10406 - protein, 17 aa, Artificial Sequence
  Synthetically generated peptide
  VARIANT (1)..(17): Xaa = Any Amino Acid
ACEYCAXNXPAXCTGXC

SEQ ID NO: 10407 - protein, 16 aa, Artificial Sequence
  Synthetically generated peptide
  VARIANT (1)..(16): Xaa = Any Amino Acid
ACEYCAXNXPACXTGC

SEQ ID NO: 10408 - protein, 17 aa, Artificial Sequence
  Synthetically generated peptide
  VARIANT (1)..(17): Xaa = Any Amino Acid
ACEYCAXNXPACXXTGC

SEQ ID NO: 10409 - protein, 17 aa, Artificial Sequence
  Synthetically generated peptide
  VARIANT (1)..(17): Xaa = Any Amino Acid
ACEYCAXNXPACXTXGC

SEQ ID NO: 10410 - protein, 17 aa, Artificial Sequence
  Synthetically generated peptide
  VARIANT (1)..(17): Xaa = Any Amino Acid
ACEYCAXNXPACXTGXC

SEQ ID NO: 10411 - protein, 16 aa, Artificial Sequence
  Synthetically generated peptide
  VARIANT (1)..(16): Xaa = Any Amino Acid
ACEYCAXNXPACTXGC

SEQ ID NO: 10412 - protein, 17 aa, Artificial Sequence
  Synthetically generated peptide
  VARIANT (1)..(17): Xaa = Any Amino Acid
ACEYCAXNXPACTXXGC

SEQ ID NO: 10413 - protein, 17 aa, Artificial Sequence
  Synthetically generated peptide
  VARIANT (1)..(17): Xaa = Any Amino Acid
ACEYCAXNXPACTXGXC

SEQ ID NO: 10414 - protein, 16 aa, Artificial Sequence
  Synthetically generated peptide
  VARIANT (1)..(16): Xaa = Any Amino Acid
ACEYCAXNXPACTGXC

SEQ ID NO: 10415 - protein, 17 aa, Artificial Sequence
  Synthetically generated peptide
  VARIANT (1)..(17): Xaa = Any Amino Acid
ACEYCAXNXPACTGXXC

SEQ ID NO: 10416 - protein, 15 aa, Artificial Sequence
  Synthetically generated peptide
  VARIANT (1)..(15): Xaa = Any Amino Acid
ACEYCAXNPXACTGC

SEQ ID NO: 10417 - protein, 16 aa, Artificial Sequence
  Synthetically generated peptide
  VARIANT (1)..(16): Xaa = Any Amino Acid
ACEYCAXNPXXACTGC

SEQ ID NO: 10418 - protein, 17 aa, Artificial Sequence
  Synthetically generated peptide
  VARIANT (1)..(17): Xaa = Any Amino Acid
ACEYCAXNPXXXACTGC

SEQ ID NO: 10419 - protein, 17 aa, Artificial Sequence
  Synthetically generated peptide
  VARIANT (1)..(17): Xaa = Any Amino Acid
ACEYCAXNPXXAXCTGC

SEQ ID NO: 10420 - protein, 17 aa, Artificial Sequence
  Synthetically generated peptide
  VARIANT (1)..(17): Xaa = Any Amino Acid
ACEYCAXNPXXACXTGC

SEQ ID NO: 10421 - protein, 17 aa, Artificial Sequence
  Synthetically generated peptide
  VARIANT (1)..(17): Xaa = Any Amino Acid
ACEYCAXNPXXACTXGC

SEQ ID NO: 10422 - protein, 17 aa, Artificial Sequence
  Synthetically generated peptide
  VARIANT (1)..(17): Xaa = Any Amino Acid
ACEYCAXNPXXACTGXC

SEQ ID NO: 10423 - protein, 16 aa, Artificial Sequence
  Synthetically generated peptide
  VARIANT (1)..(16): Xaa = Any Amino Acid
ACEYCAXNPXAXCTGC

SEQ ID NO: 10424 - protein, 17 aa, Artificial Sequence
  Synthetically generated peptide
  VARIANT (1)..(17): Xaa = Any Amino Acid
ACEYCAXNPXAXXCTGC

SEQ ID NO: 10425 - protein, 17 aa, Artificial Sequence
  Synthetically generated peptide
  VARIANT (1)..(17): Xaa = Any Amino Acid
ACEYCAXNPXAXCXTGC

SEQ ID NO: 10426 - protein, 17 aa, Artificial Sequence
  Synthetically generated peptide
  VARIANT (1)..(17): Xaa = Any Amino Acid
ACEYCAXNPXAXCTXGC

SEQ ID NO: 10427 - protein, 17 aa, Artificial Sequence
  Synthetically generated peptide
  VARIANT (1)..(17): Xaa = Any Amino Acid
ACEYCAXNPXAXCTGXC

SEQ ID NO: 10428 - protein, 16 aa, Artificial Sequence
  Synthetically generated peptide
  VARIANT (1)..(16): Xaa = Any Amino Acid
ACEYCAXNPXACXTGC

SEQ ID NO: 10429 - protein, 17 aa, Artificial Sequence
  Synthetically generated peptide
  VARIANT (1)..(17): Xaa = Any Amino Acid
ACEYCAXNPXACXXTGC

SEQ ID NO: 10430 - protein, 17 aa, Artificial Sequence
  Synthetically generated peptide
  VARIANT (1)..(17): Xaa = Any Amino Acid
ACEYCAXNPXACXTXGC

SEQ ID NO: 10431 - protein, 17 aa, Artificial Sequence
  Synthetically generated peptide
  VARIANT (1)..(17): Xaa = Any Amino Acid
ACEYCAXNPXACXTGXC

SEQ ID NO: 10432 - protein, 16 aa, Artificial Sequence
  Synthetically generated peptide
  VARIANT (1)..(16): Xaa = Any Amino Acid
ACEYCAXNPXACTXGC

SEQ ID NO: 10433 - protein, 17 aa, Artificial Sequence
  Synthetically generated peptide
  VARIANT (1)..(17): Xaa = Any Amino Acid
ACEYCAXNPXACTXXGC

SEQ ID NO: 10434 - protein, 17 aa, Artificial Sequence
  Synthetically generated peptide
  VARIANT (1)..(17): Xaa = Any Amino Acid
ACEYCAXNPXACTXGXC

SEQ ID NO: 10435 - protein, 16 aa, Artificial Sequence
  Synthetically generated peptide
  VARIANT (1)..(16): Xaa = Any Amino Acid
ACEYCAXNPXACTGXC

SEQ ID NO: 10436 - protein, 17 aa, Artificial Sequence
  Synthetically generated peptide
  VARIANT (1)..(17): Xaa = Any Amino Acid
ACEYCAXNPXACTGXXC

SEQ ID NO: 10437 - protein, 15 aa, Artificial Sequence
  Synthetically generated peptide
  VARIANT (1)..(15): Xaa = Any Amino Acid
ACEYCAXNPAXCTGC

SEQ ID NO: 10438 - protein, 16 aa, Artificial Sequence
  Synthetically generated peptide
  VARIANT (1)..(16): Xaa = Any Amino Acid
ACEYCAXNPAXXCTGC

SEQ ID NO: 10439 - protein, 17 aa, Artificial Sequence
  Synthetically generated peptide
  VARIANT (1)..(17): Xaa = Any Amino Acid
ACEYCAXNPAXXXCTGC

SEQ ID NO: 10440 - protein, 17 aa, Artificial Sequence
  Synthetically generated peptide
  VARIANT (1)..(17): Xaa = Any Amino Acid
ACEYCAXNPAXXCXTGC

SEQ ID NO: 10441 - protein, 17 aa, Artificial Sequence
  Synthetically generated peptide
  VARIANT (1)..(17): Xaa = Any Amino Acid
ACEYCAXNPAXXCTXGC

SEQ ID NO: 10442 - protein, 17 aa, Artificial Sequence
  Synthetically generated peptide
  VARIANT (1)..(17): Xaa = Any Amino Acid
ACEYCAXNPAXXCTGXC

SEQ ID NO: 10443 - protein, 16 aa, Artificial Sequence
  Synthetically generated peptide
  VARIANT (1)..(16): Xaa = Any Amino Acid
ACEYCAXNPAXCXTGC

SEQ ID NO: 10444 - protein, 17 aa, Artificial Sequence
  Synthetically generated peptide
  VARIANT (1)..(17): Xaa = Any Amino Acid
ACEYCAXNPAXCXXTGC

SEQ ID NO: 10445 - protein, 17 aa, Artificial Sequence
  Synthetically generated peptide
  VARIANT (1)..(17): Xaa = Any Amino Acid
ACEYCAXNPAXCXTXGC

SEQ ID NO: 10446 - protein, 17 aa, Artificial Sequence
  Synthetically generated peptide
  VARIANT (1)..(17): Xaa = Any Amino Acid
ACEYCAXNPAXCXTGXC

SEQ ID NO: 10447 - protein, 16 aa, Artificial Sequence
  Synthetically generated peptide
  VARIANT (1)..(16): Xaa = Any Amino Acid
ACEYCAXNPAXCTXGC

SEQ ID NO: 10448 - protein, 17 aa, Artificial Sequence
  Synthetically generated peptide
  VARIANT (1)..(17): Xaa = Any Amino Acid
ACEYCAXNPAXCTXXGC

SEQ ID NO: 10449 - protein, 17 aa, Artificial Sequence
  Synthetically generated peptide
  VARIANT (1)..(17): Xaa = Any Amino Acid
ACEYCAXNPAXCTXGXC

SEQ ID NO: 10450 - protein, 16 aa, Artificial Sequence
  Synthetically generated peptide
  VARIANT (1)..(16): Xaa = Any Amino Acid
ACEYCAXNPAXCTGXC

SEQ ID NO: 10451 - protein, 17 aa, Artificial Sequence
  Synthetically generated peptide
  VARIANT (1)..(17): Xaa = Any Amino Acid
ACEYCAXNPAXCTGXXC

SEQ ID NO: 10452 - protein, 15 aa, Artificial Sequence
  Synthetically generated peptide
  VARIANT (1)..(15): Xaa = Any Amino Acid
ACEYCAXNPACXTGC

SEQ ID NO: 10453 - protein, 16 aa, Artificial Sequence
  Synthetically generated peptide
  VARIANT (1)..(16): Xaa = Any Amino Acid
ACEYCAXNPACXXTGC

SEQ ID NO: 10454 - protein, 17 aa, Artificial Sequence
  Synthetically generated peptide
  VARIANT (1)..(17): Xaa = Any Amino Acid
ACEYCAXNPACXXXTGC

SEQ ID NO: 10455 - protein, 17 aa, Artificial Sequence
  Synthetically generated peptide
  VARIANT (1)..(17): Xaa = Any Amino Acid
ACEYCAXNPACXXTXGC

SEQ ID NO: 10456 - protein, 17 aa, Artificial Sequence
  Synthetically generated peptide
  VARIANT (1)..(17): Xaa = Any Amino Acid
ACEYCAXNPACXXTGXC

SEQ ID NO: 10457 - protein, 16 aa, Artificial Sequence
  Synthetically generated peptide
  VARIANT (1)..(16): Xaa = Any Amino Acid
ACEYCAXNPACXTXGC

SEQ ID NO: 10458 - protein, 17 aa, Artificial Sequence
  Synthetically generated peptide
  VARIANT (1)..(17): Xaa = Any Amino Acid
ACEYCAXNPACXTXXGC

SEQ ID NO: 10459 - protein, 17 aa, Artificial Sequence
  Synthetically generated peptide
  VARIANT (1)..(17): Xaa = Any Amino Acid
ACEYCAXNPACXTXGXC

SEQ ID NO: 10460 - protein, 16 aa, Artificial Sequence
  Synthetically generated peptide
  VARIANT (1)..(16): Xaa = Any Amino Acid
ACEYCAXNPACXTGXC

SEQ ID NO: 10461 - protein, 17 aa, Artificial Sequence
  Synthetically generated peptide
  VARIANT (1)..(17): Xaa = Any Amino Acid
ACEYCAXNPACXTGXXC

SEQ ID NO: 10462 - protein, 15 aa, Artificial Sequence
  Synthetically generated peptide
  VARIANT (1)..(15): Xaa = Any Amino Acid
ACEYCAXNPACTXGC

SEQ ID NO: 10463 - protein, 16 aa, Artificial Sequence
  Synthetically generated peptide
  VARIANT (1)..(16): Xaa = Any Amino Acid
ACEYCAXNPACTXXGC

SEQ ID NO: 10464 - protein, 17 aa, Artificial Sequence
  Synthetically generated peptide
  VARIANT (1)..(17): Xaa = Any Amino Acid
ACEYCAXNPACTXXXGC

SEQ ID NO: 10465 - protein, 17 aa, Artificial Sequence
  Synthetically generated peptide
  VARIANT (1)..(17): Xaa = Any Amino Acid
ACEYCAXNPACTXXGXC

SEQ ID NO: 10466 - protein, 16 aa, Artificial Sequence
  Synthetically generated peptide
  VARIANT (1)..(16): Xaa = Any Amino Acid
ACEYCAXNPACTXGXC

SEQ ID NO: 10467 - protein, 17 aa, Artificial Sequence
  Synthetically generated peptide
  VARIANT (1)..(17): Xaa = Any Amino Acid
ACEYCAXNPACTXGXXC

SEQ ID NO: 10468 - protein, 15 aa, Artificial Sequence
  Synthetically generated peptide
  VARIANT (1)..(15): Xaa = Any Amino Acid
ACEYCAXNPACTGXC

SEQ ID NO: 10469 - protein, 16 aa, Artificial Sequence
  Synthetically generated peptide
  VARIANT (1)..(16): Xaa = Any Amino Acid
ACEYCAXNPACTGXXC

SEQ ID NO: 10470 - protein, 17 aa, Artificial Sequence
  Synthetically generated peptide
  VARIANT (1)..(17): Xaa = Any Amino Acid
ACEYCAXNPACTGXXXC

SEQ ID NO: 10471 - protein, 14 aa, Artificial Sequence
  Synthetically generated peptide
  VARIANT (1)..(14): Xaa = Any Amino Acid
ACEYCANXPACTGC

SEQ ID NO: 10472 - protein, 15 aa, Artificial Sequence
  Synthetically generated peptide
  VARIANT (1)..(15): Xaa = Any Amino Acid
ACEYCANXXPACTGC

SEQ ID NO: 10473 - protein, 16 aa, Artificial Sequence
  Synthetically generated peptide
  VARIANT (1)..(16): Xaa = Any Amino Acid
ACEYCANXXXPACTGC

SEQ ID NO: 10474 - protein, 17 aa, Artificial Sequence
  Synthetically generated peptide
  VARIANT (1)..(17): Xaa = Any Amino Acid
ACEYCANXXXXPACTGC

SEQ ID NO: 10475 - protein, 17 aa, Artificial Sequence
  Synthetically generated peptide
  VARIANT (1)..(17): Xaa = Any Amino Acid
ACEYCANXXXPXACTGC

SEQ ID NO: 10476 - protein, 17 aa, Artificial Sequence
  Synthetically generated peptide
  VARIANT (1)..(17): Xaa = Any Amino Acid
ACEYCANXXXPAXCTGC

SEQ ID NO: 10477 - protein, 17 aa, Artificial Sequence
  Synthetically generated peptide
  VARIANT (1)..(17): Xaa = Any Amino Acid
ACEYCANXXXPACXTGC

SEQ ID NO: 10478 - protein, 17 aa, Artificial Sequence
  Synthetically generated peptide
  VARIANT (1)..(17): Xaa = Any Amino Acid
ACEYCANXXXPACTXGC

SEQ ID NO: 10479 - protein, 17 aa, Artificial Sequence
  Synthetically generated peptide
  VARIANT (1)..(17): Xaa = Any Amino Acid
ACEYCANXXXPACTGXC

SEQ ID NO: 10480 - protein, 16 aa, Artificial Sequence
  Synthetically generated peptide
  VARIANT (1)..(16): Xaa = Any Amino Acid
ACEYCANXXPXACTGC

SEQ ID NO: 10481 - protein, 17 aa, Artificial Sequence
  Synthetically generated peptide
  VARIANT (1)..(17): Xaa = Any Amino Acid
ACEYCANXXPXXACTGC

SEQ ID NO: 10482 - protein, 17 aa, Artificial Sequence
  Synthetically generated peptide
  VARIANT (1)..(17): Xaa = Any Amino Acid
ACEYCANXXPXAXCTGC

SEQ ID NO: 10483 - protein, 17 aa, Artificial Sequence
  Synthetically generated peptide
  VARIANT (1)..(17): Xaa = Any Amino Acid
ACEYCANXXPXACXTGC

SEQ ID NO: 10484 - protein, 17 aa, Artificial Sequence
  Synthetically generated peptide
  VARIANT (1)..(17): Xaa = Any Amino Acid
ACEYCANXXPXACTXGC

SEQ ID NO: 10485 - protein, 17 aa, Artificial Sequence
  Synthetically generated peptide
  VARIANT (1)..(17): Xaa = Any Amino Acid
ACEYCANXXPXACTGXC

SEQ ID NO: 10486 - protein, 16 aa, Artificial Sequence
  Synthetically generated peptide
  VARIANT (1)..(16): Xaa = Any Amino Acid
ACEYCANXXPAXCTGC

SEQ ID NO: 10487 - protein, 17 aa, Artificial Sequence
  Synthetically generated peptide
  VARIANT (1)..(17): Xaa = Any Amino Acid
ACEYCANXXPAXXCTGC

SEQ ID NO: 10488 - protein, 17 aa, Artificial Sequence
  Synthetically generated peptide
  VARIANT (1)..(17): Xaa = Any Amino Acid
ACEYCANXXPAXCXTGC

SEQ ID NO: 10489 - protein, 17 aa, Artificial Sequence
  Synthetically generated peptide
  VARIANT (1)..(17): Xaa = Any Amino Acid
ACEYCANXXPAXCTXGC

SEQ ID NO: 10490 - protein, 17 aa, Artificial Sequence
  Synthetically generated peptide
  VARIANT (1)..(17): Xaa = Any Amino Acid
ACEYCANXXPAXCTGXC

SEQ ID NO: 10491 - protein, 16 aa, Artificial Sequence
  Synthetically generated peptide
  VARIANT (1)..(16): Xaa = Any Amino Acid
ACEYCANXXPACXTGC

SEQ ID NO: 10492 - protein, 17 aa, Artificial Sequence
  Synthetically generated peptide
  VARIANT (1)..(17): Xaa = Any Amino Acid
ACEYCANXXPACXXTGC

SEQ ID NO: 10493 - protein, 17 aa, Artificial Sequence
  Synthetically generated peptide
  VARIANT (1)..(17): Xaa = Any Amino Acid
ACEYCANXXPACXTXGC

SEQ ID NO: 10494 - protein, 17 aa, Artificial Sequence
  Synthetically generated peptide
  VARIANT (1)..(17): Xaa = Any Amino Acid
ACEYCANXXPACXTGXC

SEQ ID NO: 10495 - protein, 16 aa, Artificial Sequence
  Synthetically generated peptide
  VARIANT (1)..(16): Xaa = Any Amino Acid
ACEYCANXXPACTXGC

SEQ ID NO: 10496 - protein, 17 aa, Artificial Sequence
  Synthetically generated peptide
  VARIANT (1)..(17): Xaa = Any Amino Acid
ACEYCANXXPACTXXGC

SEQ ID NO: 10497 - protein, 17 aa, Artificial Sequence
  Synthetically generated peptide
  VARIANT (1)..(17): Xaa = Any Amino Acid
ACEYCANXXPACTXGXC

SEQ ID NO: 10498 - protein, 16 aa, Artificial Sequence
  Synthetically generated peptide
  VARIANT (1)..(16): Xaa = Any Amino Acid
ACEYCANXXPACTGXC

SEQ ID NO: 10499 - protein, 17 aa, Artificial Sequence
  Synthetically generated peptide
  VARIANT (1)..(17): Xaa = Any Amino Acid
ACEYCANXXPACTGXXC

SEQ ID NO: 10500 - protein, 15 aa, Artificial Sequence
  Synthetically generated peptide
  VARIANT (1)..(15): Xaa = Any Amino Acid
ACEYCANXPXACTGC

SEQ ID NO: 10501 - protein, 16 aa, Artificial Sequence
  Synthetically generated peptide
  VARIANT (1)..(16): Xaa = Any Amino Acid
ACEYCANXPXXACTGC

SEQ ID NO: 10502 - protein, 17 aa, Artificial Sequence
  Synthetically generated peptide
  VARIANT (1)..(17): Xaa = Any Amino Acid
ACEYCANXPXXXACTGC

SEQ ID NO: 10503 - protein, 17 aa, Artificial Sequence
  Synthetically generated peptide
  VARIANT (1)..(17): Xaa = Any Amino Acid
ACEYCANXPXXAXCTGC

SEQ ID NO: 10504 - protein, 17 aa, Artificial Sequence
  Synthetically generated peptide
  VARIANT (1)..(17): Xaa = Any Amino Acid
ACEYCANXPXXACXTGC

SEQ ID NO: 10505 - protein, 17 aa, Artificial Sequence
  Synthetically generated peptide
  VARIANT (1)..(17): Xaa = Any Amino Acid
ACEYCANXPXXACTXGC

SEQ ID NO: 10506 - protein, 17 aa, Artificial Sequence
  Synthetically generated peptide
  VARIANT (1)..(17): Xaa = Any Amino Acid
ACEYCANXPXXACTGXC

SEQ ID NO: 10507 - protein, 16 aa, Artificial Sequence
  Synthetically generated peptide
  VARIANT (1)..(16): Xaa = Any Amino Acid
ACEYCANXPXAXCTGC

SEQ ID NO: 10508 - protein, 17 aa, Artificial Sequence
  Synthetically generated peptide
  VARIANT (1)..(17): Xaa = Any Amino Acid
ACEYCANXPXAXXCTGC

SEQ ID NO: 10509 - protein, 17 aa, Artificial Sequence
  Synthetically generated peptide
  VARIANT (1)..(17): Xaa = Any Amino Acid
ACEYCANXPXAXCXTGC

SEQ ID NO: 10510 - protein, 17 aa, Artificial Sequence
  Synthetically generated peptide
  VARIANT (1)..(17): Xaa = Any Amino Acid
ACEYCANXPXAXCTXGC

SEQ ID NO: 10511 - protein, 17 aa, Artificial Sequence
  Synthetically generated peptide
  VARIANT (1)..(17): Xaa = Any Amino Acid
ACEYCANXPXAXCTGXC

SEQ ID NO: 10512 - protein, 16 aa, Artificial Sequence
  Synthetically generated peptide
  VARIANT (1)..(16): Xaa = Any Amino Acid
ACEYCANXPXACXTGC

SEQ ID NO: 10513 - protein, 17 aa, Artificial Sequence
  Synthetically generated peptide
  VARIANT (1)..(17): Xaa = Any Amino Acid
ACEYCANXPXACXXTGC

SEQ ID NO: 10514 - protein, 17 aa, Artificial Sequence
  Synthetically generated peptide
  VARIANT (1)..(17): Xaa = Any Amino Acid
ACEYCANXPXACXTXGC

SEQ ID NO: 10515 - protein, 17 aa, Artificial Sequence
  Synthetically generated peptide
  VARIANT (1)..(17): Xaa = Any Amino Acid
ACEYCANXPXACXTGXC

SEQ ID NO: 10516 - protein, 16 aa, Artificial Sequence
  Synthetically generated peptide
  VARIANT (1)..(16): Xaa = Any Amino Acid
ACEYCANXPXACTXGC

SEQ ID NO: 10517 - protein, 17 aa, Artificial Sequence
  Synthetically generated peptide
  VARIANT (1)..(17): Xaa = Any Amino Acid
ACEYCANXPXACTXXGC

SEQ ID NO: 10518 - protein, 17 aa, Artificial Sequence
  Synthetically generated peptide
  VARIANT (1)..(17): Xaa = Any Amino Acid
ACEYCANXPXACTXGXC

SEQ ID NO: 10519 - protein, 16 aa, Artificial Sequence
  Synthetically generated peptide
  VARIANT (1)..(16): Xaa = Any Amino Acid
ACEYCANXPXACTGXC

SEQ ID NO: 10520 - protein, 17 aa, Artificial Sequence
  Synthetically generated peptide
  VARIANT (1)..(17): Xaa = Any Amino Acid
ACEYCANXPXACTGXXC

SEQ ID NO: 10521 - protein, 15 aa, Artificial Sequence
  Synthetically generated peptide
  VARIANT (1)..(15): Xaa = Any Amino Acid
ACEYCANXPAXCTGC

SEQ ID NO: 10522 - protein, 16 aa, Artificial Sequence
  Synthetically generated peptide
  VARIANT (1)..(16): Xaa = Any Amino Acid
ACEYCANXPAXXCTGC

SEQ ID NO: 10523 - protein, 17 aa, Artificial Sequence
  Synthetically generated peptide
  VARIANT (1)..(17): Xaa = Any Amino Acid
ACEYCANXPAXXXCTGC

SEQ ID NO: 10524 - protein, 17 aa, Artificial Sequence
  Synthetically generated peptide
  VARIANT (1)..(17): Xaa = Any Amino Acid
ACEYCANXPAXXCXTGC

SEQ ID NO: 10525 - protein, 17 aa, Artificial Sequence
  Synthetically generated peptide
  VARIANT (1)..(17): Xaa = Any Amino Acid
ACEYCANXPAXXCTXGC

SEQ ID NO: 10526 - protein, 17 aa, Artificial Sequence
  Synthetically generated peptide
  VARIANT (1)..(17): Xaa = Any Amino Acid
ACEYCANXPAXXCTGXC

SEQ ID NO: 10527 - protein, 16 aa, Artificial Sequence
  Synthetically generated peptide
  VARIANT (1)..(16): Xaa = Any Amino Acid
ACEYCANXPAXCXTGC

SEQ ID NO: 10528 - protein, 17 aa, Artificial Sequence
  Synthetically generated peptide
  VARIANT (1)..(17): Xaa = Any Amino Acid
ACEYCANXPAXCXXTGC

SEQ ID NO: 10529 - protein, 17 aa, Artificial Sequence
  Synthetically generated peptide
  VARIANT (1)..(17): Xaa = Any Amino Acid
ACEYCANXPAXCXTXGC

SEQ ID NO: 10530 - protein, 17 aa, Artificial Sequence
  Synthetically generated peptide
  VARIANT (1)..(17): Xaa = Any Amino Acid
ACEYCANXPAXCXTGXC

SEQ ID NO: 10531 - protein, 16 aa, Artificial Sequence
  Synthetically generated peptide
  VARIANT (1)..(16): Xaa = Any Amino Acid
ACEYCANXPAXCTXGC

SEQ ID NO: 10532 - protein, 17 aa, Artificial Sequence
  Synthetically generated peptide
  VARIANT (1)..(17): Xaa = Any Amino Acid
ACEYCANXPAXCTXXGC

SEQ ID NO: 10533 - protein, 17 aa, Artificial Sequence
  Synthetically generated peptide
  VARIANT (1)..(17): Xaa = Any Amino Acid
ACEYCANXPAXCTXGXC

SEQ ID NO: 10534 - protein, 16 aa, Artificial Sequence
  Synthetically generated peptide
  VARIANT (1)..(16): Xaa = Any Amino Acid
ACEYCANXPAXCTGXC

SEQ ID NO: 10535 - protein, 17 aa, Artificial Sequence
  Synthetically generated peptide
  VARIANT (1)..(17): Xaa = Any Amino Acid
ACEYCANXPAXCTGXXC

SEQ ID NO: 10536 - protein, 15 aa, Artificial Sequence
  Synthetically generated peptide
  VARIANT (1)..(15): Xaa = Any Amino Acid
ACEYCANXPACXTGC

SEQ ID NO: 10537 - protein, 16 aa, Artificial Sequence
  Synthetically generated peptide
  VARIANT (1)..(16): Xaa = Any Amino Acid
ACEYCANXPACXXTGC

SEQ ID NO: 10538 - protein, 17 aa, Artificial Sequence
  Synthetically generated peptide
  VARIANT (1)..(17): Xaa = Any Amino Acid
ACEYCANXPACXXXTGC

SEQ ID NO: 10539 - protein, 17 aa, Artificial Sequence
  Synthetically generated peptide
  VARIANT (1)..(17): Xaa = Any Amino Acid
ACEYCANXPACXXTXGC

SEQ ID NO: 10540 - protein, 17 aa, Artificial Sequence
  Synthetically generated peptide
  VARIANT (1)..(17): Xaa = Any Amino Acid
ACEYCANXPACXXTGXC

SEQ ID NO: 10541 - protein, 16 aa, Artificial Sequence
  Synthetically generated peptide
  VARIANT (1)..(16): Xaa = Any Amino Acid
ACEYCANXPACXTXGC

SEQ ID NO: 10542 - protein, 17 aa, Artificial Sequence
  Synthetically generated peptide
  VARIANT (1)..(17): Xaa = Any Amino Acid
ACEYCANXPACXTXXGC

SEQ ID NO: 10543 - protein, 17 aa, Artificial Sequence
  Synthetically generated peptide
  VARIANT (1)..(17): Xaa = Any Amino Acid
ACEYCANXPACXTXGXC

SEQ ID NO: 10544 - protein, 16 aa, Artificial Sequence
  Synthetically generated peptide
  VARIANT (1)..(16): Xaa = Any Amino Acid
ACEYCANXPACXTGXC

SEQ ID NO: 10545 - protein, 17 aa, Artificial Sequence
  Synthetically generated peptide
  VARIANT (1)..(17): Xaa = Any Amino Acid
ACEYCANXPACXTGXXC

SEQ ID NO: 10546 - protein, 15 aa, Artificial Sequence
  Synthetically generated peptide
  VARIANT (1)..(15): Xaa = Any Amino Acid
ACEYCANXPACTXGC

SEQ ID NO: 10547 - protein, 16 aa, Artificial Sequence
  Synthetically generated peptide
  VARIANT (1)..(16): Xaa = Any Amino Acid
ACEYCANXPACTXXGC

SEQ ID NO: 10548 - protein, 17 aa, Artificial Sequence
  Synthetically generated peptide
  VARIANT (1)..(17): Xaa = Any Amino Acid
ACEYCANXPACTXXXGC

SEQ ID NO: 10549 - protein, 17 aa, Artificial Sequence
  Synthetically generated peptide
  VARIANT (1)..(17): Xaa = Any Amino Acid
ACEYCANXPACTXXGXC

SEQ ID NO: 10550 - protein, 16 aa, Artificial Sequence
  Synthetically generated peptide
  VARIANT (1)..(16): Xaa = Any Amino Acid
ACEYCANXPACTXGXC

SEQ ID NO: 10551 - protein, 17 aa, Artificial Sequence
  Synthetically generated peptide
  VARIANT (1)..(17): Xaa = Any Amino Acid
ACEYCANXPACTXGXXC

SEQ ID NO: 10552 - protein, 15 aa, Artificial Sequence
  Synthetically generated peptide
  VARIANT (1)..(15): Xaa = Any Amino Acid
ACEYCANXPACTGXC

SEQ ID NO: 10553 - protein, 16 aa, Artificial Sequence
  Synthetically generated peptide
  VARIANT (1)..(16): Xaa = Any Amino Acid
ACEYCANXPACTGXXC

SEQ ID NO: 10554 - protein, 17 aa, Artificial Sequence
  Synthetically generated peptide
  VARIANT (1)..(17): Xaa = Any Amino Acid
ACEYCANXPACTGXXXC

SEQ ID NO: 10555 - protein, 14 aa, Artificial Sequence
  Synthetically generated peptide
  VARIANT (1)..(14): Xaa = Any Amino Acid
ACEYCANPXACTGC

SEQ ID NO: 10556 - protein, 15 aa, Artificial Sequence
  Synthetically generated peptide
  VARIANT (1)..(15): Xaa = Any Amino Acid
ACEYCANPXXACTGC

SEQ ID NO: 10557 - protein, 16 aa, Artificial Sequence
  Synthetically generated peptide
  VARIANT (1)..(16): Xaa = Any Amino Acid
ACEYCANPXXXACTGC

SEQ ID NO: 10558 - protein, 17 aa, Artificial Sequence
  Synthetically generated peptide
  VARIANT (1)..(17): Xaa = Any Amino Acid
ACEYCANPXXXXACTGC

SEQ ID NO: 10559 - protein, 17 aa, Artificial Sequence
  Synthetically generated peptide
  VARIANT (1)..(17): Xaa = Any Amino Acid
ACEYCANPXXXAXCTGC

SEQ ID NO: 10560 - protein, 17 aa, Artificial Sequence
  Synthetically generated peptide
  VARIANT (1)..(17): Xaa = Any Amino Acid
ACEYCANPXXXACXTGC

SEQ ID NO: 10561 - protein, 17 aa, Artificial Sequence
  Synthetically generated peptide
  VARIANT (1)..(17): Xaa = Any Amino Acid
ACEYCANPXXXACTXGC

SEQ ID NO: 10562 - protein, 17 aa, Artificial Sequence
  Synthetically generated peptide
  VARIANT (1)..(17): Xaa = Any Amino Acid
ACEYCANPXXXACTGXC

SEQ ID NO: 10563 - protein, 16 aa, Artificial Sequence
  Synthetically generated peptide
  VARIANT (1)..(16): Xaa = Any Amino Acid
ACEYCANPXXAXCTGC

SEQ ID NO: 10564 - protein, 17 aa, Artificial Sequence
  Synthetically generated peptide
  VARIANT (1)..(17): Xaa = Any Amino Acid
ACEYCANPXXAXXCTGC

SEQ ID NO: 10565 - protein, 17 aa, Artificial Sequence
  Synthetically generated peptide
  VARIANT (1)..(17): Xaa = Any Amino Acid
ACEYCANPXXAXCXTGC

SEQ ID NO: 10566 - protein, 17 aa, Artificial Sequence
  Synthetically generated peptide
  VARIANT (1)..(17): Xaa = Any Amino Acid
ACEYCANPXXAXCTXGC

SEQ ID NO: 10567 - protein, 17 aa, Artificial Sequence
  Synthetically generated peptide
  VARIANT (1)..(17): Xaa = Any Amino Acid
ACEYCANPXXAXCTGXC

SEQ ID NO: 10568 - protein, 16 aa, Artificial Sequence
  Synthetically generated peptide
  VARIANT (1)..(16): Xaa = Any Amino Acid
ACEYCANPXXACXTGC

SEQ ID NO: 10569 - protein, 17 aa, Artificial Sequence
  Synthetically generated peptide
  VARIANT (1)..(17): Xaa = Any Amino Acid
ACEYCANPXXACXXTGC

SEQ ID NO: 10570 - protein, 17 aa, Artificial Sequence
  Synthetically generated peptide
  VARIANT (1)..(17): Xaa = Any Amino Acid
ACEYCANPXXACXTXGC

SEQ ID NO: 10571 - protein, 17 aa, Artificial Sequence
  Synthetically generated peptide
  VARIANT (1)..(17): Xaa = Any Amino Acid
ACEYCANPXXACXTGXC

SEQ ID NO: 10572 - protein, 16 aa, Artificial Sequence
  Synthetically generated peptide
  VARIANT (1)..(16): Xaa = Any Amino Acid
ACEYCANPXXACTXGC

SEQ ID NO: 10573 - protein, 17 aa, Artificial Sequence
  Synthetically generated peptide
  VARIANT (1)..(17): Xaa = Any Amino Acid
ACEYCANPXXACTXXGC

SEQ ID NO: 10574 - protein, 17 aa, Artificial Sequence
  Synthetically generated peptide
  VARIANT (1)..(17): Xaa = Any Amino Acid
ACEYCANPXXACTXGXC

SEQ ID NO: 10575 - protein, 16 aa, Artificial Sequence
  Synthetically generated peptide
  VARIANT (1)..(16): Xaa = Any Amino Acid
ACEYCANPXXACTGXC

SEQ ID NO: 10576 - protein, 17 aa, Artificial Sequence
  Synthetically generated peptide
  VARIANT (1)..(17): Xaa = Any Amino Acid
ACEYCANPXXACTGXXC

SEQ ID NO: 10577 - protein, 15 aa, Artificial Sequence
  Synthetically generated peptide
  VARIANT (1)..(15): Xaa = Any Amino Acid
ACEYCANPXAXCTGC

SEQ ID NO: 10578 - protein, 16 aa, Artificial Sequence
  Synthetically generated peptide
  VARIANT (1)..(16): Xaa = Any Amino Acid
ACEYCANPXAXXCTGC

SEQ ID NO: 10579 - protein, 17 aa, Artificial Sequence
  Synthetically generated peptide
  VARIANT (1)..(17): Xaa = Any Amino Acid
ACEYCANPXAXXXCTGC

SEQ ID NO: 10580 - protein, 17 aa, Artificial Sequence
  Synthetically generated peptide
  VARIANT (1)..(17): Xaa = Any Amino Acid
ACEYCANPXAXXCXTGC

SEQ ID NO: 10581 - protein, 17 aa, Artificial Sequence
  Synthetically generated peptide
  VARIANT (1)..(17): Xaa = Any Amino Acid
ACEYCANPXAXXCTXGC

SEQ ID NO: 10582 - protein, 17 aa, Artificial Sequence
  Synthetically generated peptide
  VARIANT (1)..(17): Xaa = Any Amino Acid
ACEYCANPXAXXCTGXC

SEQ ID NO: 10583 - protein, 16 aa, Artificial Sequence
  Synthetically generated peptide
  VARIANT (1)..(16): Xaa = Any Amino Acid
ACEYCANPXAXCXTGC

SEQ ID NO: 10584 - protein, 17 aa, Artificial Sequence
  Synthetically generated peptide
  VARIANT (1)..(17): Xaa = Any Amino Acid
ACEYCANPXAXCXXTGC

SEQ ID NO: 10585 - protein, 17 aa, Artificial Sequence
  Synthetically generated peptide
  VARIANT (1)..(17): Xaa = Any Amino Acid
ACEYCANPXAXCXTXGC

SEQ ID NO: 10586 - protein, 17 aa, Artificial Sequence
  Synthetically generated peptide
  VARIANT (1)..(17): Xaa = Any Amino Acid
ACEYCANPXAXCXTGXC

SEQ ID NO: 10587 - protein, 16 aa, Artificial Sequence
  Synthetically generated peptide
  VARIANT (1)..(16): Xaa = Any Amino Acid
ACEYCANPXAXCTXGC

SEQ ID NO: 10588 - protein, 17 aa, Artificial Sequence
  Synthetically generated peptide
  VARIANT (1)..(17): Xaa = Any Amino Acid
ACEYCANPXAXCTXXGC

SEQ ID NO: 10589 - protein, 17 aa, Artificial Sequence
  Synthetically generated peptide
  VARIANT (1)..(17): Xaa = Any Amino Acid
ACEYCANPXAXCTXGXC

SEQ ID NO: 10590 - protein, 16 aa, Artificial Sequence
  Synthetically generated peptide
  VARIANT (1)..(16): Xaa = Any Amino Acid
ACEYCANPXAXCTGXC

SEQ ID NO: 10591 - protein, 17 aa, Artificial Sequence
  Synthetically generated peptide
  VARIANT (1)..(17): Xaa = Any Amino Acid
ACEYCANPXAXCTGXXC

SEQ ID NO: 10592 - protein, 15 aa, Artificial Sequence
  Synthetically generated peptide
  VARIANT (1)..(15): Xaa = Any Amino Acid
ACEYCANPXACXTGC

SEQ ID NO: 10593 - protein, 16 aa, Artificial Sequence
  Synthetically generated peptide
  VARIANT (1)..(16): Xaa = Any Amino Acid
ACEYCANPXACXXTGC

SEQ ID NO: 10594 - protein, 17 aa, Artificial Sequence
  Synthetically generated peptide
  VARIANT (1)..(17): Xaa = Any Amino Acid
ACEYCANPXACXXXTGC

SEQ ID NO: 10595 - protein, 17 aa, Artificial Sequence
  Synthetically generated peptide
  VARIANT (1)..(17): Xaa = Any Amino Acid
ACEYCANPXACXXTXGC

SEQ ID NO: 10596 - protein, 17 aa, Artificial Sequence
  Synthetically generated peptide
  VARIANT (1)..(17): Xaa = Any Amino Acid
ACEYCANPXACXXTGXC

SEQ ID NO: 10597 - protein, 16 aa, Artificial Sequence
  Synthetically generated peptide
  VARIANT (1)..(16): Xaa = Any Amino Acid
ACEYCANPXACXTXGC

SEQ ID NO: 10598 - protein, 17 aa, Artificial Sequence
  Synthetically generated peptide
  VARIANT (1)..(17): Xaa = Any Amino Acid
ACEYCANPXACXTXXGC

SEQ ID NO: 10599 - protein, 17 aa, Artificial Sequence
  Synthetically generated peptide
  VARIANT (1)..(17): Xaa = Any Amino Acid
ACEYCANPXACXTXGXC

SEQ ID NO: 10600 - protein, 16 aa, Artificial Sequence
  Synthetically generated peptide
  VARIANT (1)..(16): Xaa = Any Amino Acid
ACEYCANPXACXTGXC

SEQ ID NO: 10601 - protein, 17 aa, Artificial Sequence
  Synthetically generated peptide
  VARIANT (1)..(17): Xaa = Any Amino Acid
ACEYCANPXACXTGXXC

SEQ ID NO: 10602 - protein, 15 aa, Artificial Sequence
  Synthetically generated peptide
  VARIANT (1)..(15): Xaa = Any Amino Acid
ACEYCANPXACTXGC

SEQ ID NO: 10603 - protein, 16 aa, Artificial Sequence
  Synthetically generated peptide
  VARIANT (1)..(16): Xaa = Any Amino Acid
ACEYCANPXACTXXGC

SEQ ID NO: 10604 - protein, 17 aa, Artificial Sequence
  Synthetically generated peptide
  VARIANT (1)..(17): Xaa = Any Amino Acid
ACEYCANPXACTXXXGC

SEQ ID NO: 10605 - protein, 17 aa, Artificial Sequence
  Synthetically generated peptide
  VARIANT (1)..(17): Xaa = Any Amino Acid
ACEYCANPXACTXXGXC

SEQ ID NO: 10606 - protein, 16 aa, Artificial Sequence
  Synthetically generated peptide
  VARIANT (1)..(16): Xaa = Any Amino Acid
ACEYCANPXACTXGXC

SEQ ID NO: 10607 - protein, 17 aa, Artificial Sequence
  Synthetically generated peptide
  VARIANT (1)..(17): Xaa = Any Amino Acid
ACEYCANPXACTXGXXC

SEQ ID NO: 10608 - protein, 15 aa, Artificial Sequence
  Synthetically generated peptide
  VARIANT (1)..(15): Xaa = Any Amino Acid
ACEYCANPXACTGXC

SEQ ID NO: 10609 - protein, 16 aa, Artificial Sequence
  Synthetically generated peptide
  VARIANT (1)..(16): Xaa = Any Amino Acid
ACEYCANPXACTGXXC

SEQ ID NO: 10610 - protein, 17 aa, Artificial Sequence
  Synthetically generated peptide
  VARIANT (1)..(17): Xaa = Any Amino Acid
ACEYCANPXACTGXXXC

SEQ ID NO: 10611 - protein, 14 aa, Artificial Sequence
  Synthetically generated peptide
  VARIANT (1)..(14): Xaa = Any Amino Acid
ACEYCANPAXCTGC

SEQ ID NO: 10612 - protein, 15 aa, Artificial Sequence
  Synthetically generated peptide
  VARIANT (1)..(15): Xaa = Any Amino Acid
ACEYCANPAXXCTGC

SEQ ID NO: 10613 - protein, 16 aa, Artificial Sequence
  Synthetically generated peptide
  VARIANT (1)..(16): Xaa = Any Amino Acid
ACEYCANPAXXXCTGC

SEQ ID NO: 10614 - protein, 17 aa, Artificial Sequence
  Synthetically generated peptide
  VARIANT (1)..(17): Xaa = Any Amino Acid
ACEYCANPAXXXXCTGC

SEQ ID NO: 10615 - protein, 17 aa, Artificial Sequence
  Synthetically generated peptide
  VARIANT (1)..(17): Xaa = Any Amino Acid
ACEYCANPAXXXCXTGC

SEQ ID NO: 10616 - protein, 17 aa, Artificial Sequence
  Synthetically generated peptide
  VARIANT (1)..(17): Xaa = Any Amino Acid
ACEYCANPAXXXCTXGC

SEQ ID NO: 10617 - protein, 17 aa, Artificial Sequence
  Synthetically generated peptide
  VARIANT (1)..(17): Xaa = Any Amino Acid
ACEYCANPAXXXCTGXC

SEQ ID NO: 10618 - protein, 16 aa, Artificial Sequence
  Synthetically generated peptide
  VARIANT (1)..(16): Xaa = Any Amino Acid
ACEYCANPAXXCXTGC

SEQ ID NO: 10619 - protein, 17 aa, Artificial Sequence
  Synthetically generated peptide
  VARIANT (1)..(17): Xaa = Any Amino Acid
ACEYCANPAXXCXXTGC

SEQ ID NO: 10620 - protein, 17 aa, Artificial Sequence
  Synthetically generated peptide
  VARIANT (1)..(17): Xaa = Any Amino Acid
ACEYCANPAXXCXTXGC

SEQ ID NO: 10621 - protein, 17 aa, Artificial Sequence
  Synthetically generated peptide
  VARIANT (1)..(17): Xaa = Any Amino Acid
ACEYCANPAXXCXTGXC

SEQ ID NO: 10622 - protein, 16 aa, Artificial Sequence
  Synthetically generated peptide
  VARIANT (1)..(16): Xaa = Any Amino Acid
ACEYCANPAXXCTXGC

SEQ ID NO: 10623 - protein, 17 aa, Artificial Sequence
  Synthetically generated peptide
  VARIANT (1)..(17): Xaa = Any Amino Acid
ACEYCANPAXXCTXXGC

SEQ ID NO: 10624 - protein, 17 aa, Artificial Sequence
  Synthetically generated peptide
  VARIANT (1)..(17): Xaa = Any Amino Acid
ACEYCANPAXXCTXGXC

SEQ ID NO: 10625 - protein, 16 aa, Artificial Sequence
  Synthetically generated peptide
  VARIANT (1)..(16): Xaa = Any Amino Acid
ACEYCANPAXXCTGXC

SEQ ID NO: 10626 - protein, 17 aa, Artificial Sequence
  Synthetically generated peptide
  VARIANT (1)..(17): Xaa = Any Amino Acid
ACEYCANPAXXCTGXXC

SEQ ID NO: 10627 - protein, 15 aa, Artificial Sequence
  Synthetically generated peptide
  VARIANT (1)..(15): Xaa = Any Amino Acid
ACEYCANPAXCXTGC

SEQ ID NO: 10628 - protein, 16 aa, Artificial Sequence
  Synthetically generated peptide
  VARIANT (1)..(16): Xaa = Any Amino Acid
ACEYCANPAXCXXTGC

SEQ ID NO: 10629 - protein, 17 aa, Artificial Sequence
  Synthetically generated peptide
  VARIANT (1)..(17): Xaa = Any Amino Acid
ACEYCANPAXCXXXTGC

SEQ ID NO: 10630 - protein, 17 aa, Artificial Sequence
  Synthetically generated peptide
  VARIANT (1)..(17): Xaa = Any Amino Acid
ACEYCANPAXCXXTXGC

SEQ ID NO: 10631 - protein, 17 aa, Artificial Sequence
  Synthetically generated peptide
  VARIANT (1)..(17): Xaa = Any Amino Acid
ACEYCANPAXCXXTGXC

SEQ ID NO: 10632 - protein, 16 aa, Artificial Sequence
  Synthetically generated peptide
  VARIANT (1)..(16): Xaa = Any Amino Acid
ACEYCANPAXCXTXGC

SEQ ID NO: 10633 - protein, 17 aa, Artificial Sequence
  Synthetically generated peptide
  VARIANT (1)..(17): Xaa = Any Amino Acid
ACEYCANPAXCXTXXGC

SEQ ID NO: 10634 - protein, 17 aa, Artificial Sequence
  Synthetically generated peptide
  VARIANT (1)..(17): Xaa = Any Amino Acid
ACEYCANPAXCXTXGXC

SEQ ID NO: 10635 - protein, 16 aa, Artificial Sequence
  Synthetically generated peptide
  VARIANT (1)..(16): Xaa = Any Amino Acid
ACEYCANPAXCXTGXC

SEQ ID NO: 10636 - protein, 17 aa, Artificial Sequence
  Synthetically generated peptide
  VARIANT (1)..(17): Xaa = Any Amino Acid
ACEYCANPAXCXTGXXC

SEQ ID NO: 10637 - protein, 15 aa, Artificial Sequence
  Synthetically generated peptide
  VARIANT (1)..(15): Xaa = Any Amino Acid
ACEYCANPAXCTXGC

SEQ ID NO: 10638 - protein, 16 aa, Artificial Sequence
  Synthetically generated peptide
  VARIANT (1)..(16): Xaa = Any Amino Acid
ACEYCANPAXCTXXGC

SEQ ID NO: 10639 - protein, 17 aa, Artificial Sequence
  Synthetically generated peptide
  VARIANT (1)..(17): Xaa = Any Amino Acid
ACEYCANPAXCTXXXGC

SEQ ID NO: 10640 - protein, 17 aa, Artificial Sequence
  Synthetically generated peptide
  VARIANT (1)..(17): Xaa = Any Amino Acid
ACEYCANPAXCTXXGXC

SEQ ID NO: 10641 - protein, 16 aa, Artificial Sequence
  Synthetically generated peptide
  VARIANT (1)..(16): Xaa = Any Amino Acid
ACEYCANPAXCTXGXC

SEQ ID NO: 10642 - protein, 17 aa, Artificial Sequence
  Synthetically generated peptide
  VARIANT (1)..(17): Xaa = Any Amino Acid
ACEYCANPAXCTXGXXC

SEQ ID NO: 10643 - protein, 15 aa, Artificial Sequence
  Synthetically generated peptide
  VARIANT (1)..(15): Xaa = Any Amino Acid
ACEYCANPAXCTGXC

SEQ ID NO: 10644 - protein, 16 aa, Artificial Sequence
  Synthetically generated peptide
  VARIANT (1)..(16): Xaa = Any Amino Acid
ACEYCANPAXCTGXXC

SEQ ID NO: 10645 - protein, 17 aa, Artificial Sequence
  Synthetically generated peptide
  VARIANT (1)..(17): Xaa = Any Amino Acid
ACEYCANPAXCTGXXXC

SEQ ID NO: 10646 - protein, 14 aa, Artificial Sequence
  Synthetically generated peptide
  VARIANT (1)..(14): Xaa = Any Amino Acid
ACEYCANPACXTGC

SEQ ID NO: 10647 - protein, 15 aa, Artificial Sequence
  Synthetically generated peptide
  VARIANT (1)..(15): Xaa = Any Amino Acid
ACEYCANPACXXTGC

SEQ ID NO: 10648 - protein, 16 aa, Artificial Sequence
  Synthetically generated peptide
  VARIANT (1)..(16): Xaa = Any Amino Acid
ACEYCANPACXXXTGC

SEQ ID NO: 10649 - protein, 17 aa, Artificial Sequence
  Synthetically generated peptide
  VARIANT (1)..(17): Xaa = Any Amino Acid
ACEYCANPACXXXXTGC

SEQ ID NO: 10650 - protein, 17 aa, Artificial Sequence
  Synthetically generated peptide
  VARIANT (1)..(17): Xaa = Any Amino Acid
ACEYCANPACXXXTXGC

SEQ ID NO: 10651 - protein, 17 aa, Artificial Sequence
  Synthetically generated peptide
  VARIANT (1)..(17): Xaa = Any Amino Acid
ACEYCANPACXXXTGXC

SEQ ID NO: 10652 - protein, 16 aa, Artificial Sequence
  Synthetically generated peptide
  VARIANT (1)..(16): Xaa = Any Amino Acid
ACEYCANPACXXTXGC

SEQ ID NO: 10653 - protein, 17 aa, Artificial Sequence
  Synthetically generated peptide
  VARIANT (1)..(17): Xaa = Any Amino Acid
ACEYCANPACXXTXXGC

SEQ ID NO: 10654 - protein, 17 aa, Artificial Sequence
  Synthetically generated peptide
  VARIANT (1)..(17): Xaa = Any Amino Acid
ACEYCANPACXXTXGXC

SEQ ID NO: 10655 - protein, 16 aa, Artificial Sequence
  Synthetically generated peptide
  VARIANT (1)..(16): Xaa = Any Amino Acid
ACEYCANPACXXTGXC

SEQ ID NO: 10656 - protein, 17 aa, Artificial Sequence
  Synthetically generated peptide
  VARIANT (1)..(17): Xaa = Any Amino Acid
ACEYCANPACXXTGXXC

SEQ ID NO: 10657 - protein, 15 aa, Artificial Sequence
  Synthetically generated peptide
  VARIANT (1)..(15): Xaa = Any Amino Acid
ACEYCANPACXTXGC

SEQ ID NO: 10658 - protein, 16 aa, Artificial Sequence
  Synthetically generated peptide
  VARIANT (1)..(16): Xaa = Any Amino Acid
ACEYCANPACXTXXGC

SEQ ID NO: 10659 - protein, 17 aa, Artificial Sequence
  Synthetically generated peptide
  VARIANT (1)..(17): Xaa = Any Amino Acid
ACEYCANPACXTXXXGC

SEQ ID NO: 10660 - protein, 17 aa, Artificial Sequence
  Synthetically generated peptide
  VARIANT (1)..(17): Xaa = Any Amino Acid
ACEYCANPACXTXXGXC

SEQ ID NO: 10661 - protein, 16 aa, Artificial Sequence
  Synthetically generated peptide
  VARIANT (1)..(16): Xaa = Any Amino Acid
ACEYCANPACXTXGXC

SEQ ID NO: 10662 - protein, 17 aa, Artificial Sequence
  Synthetically generated peptide
  VARIANT (1)..(17): Xaa = Any Amino Acid
ACEYCANPACXTXGXXC

SEQ ID NO: 10663 - protein, 15 aa, Artificial Sequence
  Synthetically generated peptide
  VARIANT (1)..(15): Xaa = Any Amino Acid
ACEYCANPACXTGXC

SEQ ID NO: 10664 - protein, 16 aa, Artificial Sequence
  Synthetically generated peptide
  VARIANT (1)..(16): Xaa = Any Amino Acid
ACEYCANPACXTGXXC

SEQ ID NO: 10665 - protein, 17 aa, Artificial Sequence
  Synthetically generated peptide
  VARIANT (1)..(17): Xaa = Any Amino Acid
ACEYCANPACXTGXXXC

SEQ ID NO: 10666 - protein, 14 aa, Artificial Sequence
  Synthetically generated peptide
  VARIANT (1)..(14): Xaa = Any Amino Acid
ACEYCANPACTXGC

SEQ ID NO: 10667 - protein, 15 aa, Artificial Sequence
  Synthetically generated peptide
  VARIANT (1)..(15): Xaa = Any Amino Acid
ACEYCANPACTXXGC

SEQ ID NO: 10668 - protein, 16 aa, Artificial Sequence
  Synthetically generated peptide
  VARIANT (1)..(16): Xaa = Any Amino Acid
ACEYCANPACTXXXGC

SEQ ID NO: 10669 - protein, 17 aa, Artificial Sequence
  Synthetically generated peptide
  VARIANT (1)..(17): Xaa = Any Amino Acid
ACEYCANPACTXXXXGC

SEQ ID NO: 10670 - protein, 17 aa, Artificial Sequence
  Synthetically generated peptide
  VARIANT (1)..(17): Xaa = Any Amino Acid
ACEYCANPACTXXXGXC

SEQ ID NO: 10671 - protein, 16 aa, Artificial Sequence
  Synthetically generated peptide
  VARIANT (1)..(16): Xaa = Any Amino Acid
ACEYCANPACTXXGXC

SEQ ID NO: 10672 - protein, 17 aa, Artificial Sequence
  Synthetically generated peptide
  VARIANT (1)..(17): Xaa = Any Amino Acid
ACEYCANPACTXXGXXC

SEQ ID NO: 10673 - protein, 15 aa, Artificial Sequence
  Synthetically generated peptide
  VARIANT (1)..(15): Xaa = Any Amino Acid
ACEYCANPACTXGXC

SEQ ID NO: 10674 - protein, 16 aa, Artificial Sequence
  Synthetically generated peptide
  VARIANT (1)..(16): Xaa = Any Amino Acid
ACEYCANPACTXGXXC

SEQ ID NO: 10675 - protein, 17 aa, Artificial Sequence
  Synthetically generated peptide
  VARIANT (1)..(17): Xaa = Any Amino Acid
ACEYCANPACTXGXXXC

SEQ ID NO: 10676 - protein, 14 aa, Artificial Sequence
  Synthetically generated peptide
  VARIANT (1)..(14): Xaa = Any Amino Acid
ACEYCANPACTGXC

SEQ ID NO: 10677 - protein, 15 aa, Artificial Sequence
  Synthetically generated peptide
  VARIANT (1)..(15): Xaa = Any Amino Acid
ACEYCANPACTGXXC

SEQ ID NO: 10678 - protein, 16 aa, Artificial Sequence
  Synthetically generated peptide
  VARIANT (1)..(16): Xaa = Any Amino Acid
ACEYCANPACTGXXXC

SEQ ID NO: 10679 - protein, 17 aa, Artificial Sequence
  Synthetically generated peptide
  VARIANT (1)..(17): Xaa = Any Amino Acid
ACEYCANPACTGXXXXC

SEQ ID NO: 10680 - protein, 14 aa, Artificial Sequence
  Synthetically generated peptide
  VARIANT (1)..(14): Xaa = Any Amino Acid
CCXEYACNPACTGA

SEQ ID NO: 10681 - protein, 15 aa, Artificial Sequence
  Synthetically generated peptide
  VARIANT (1)..(15): Xaa = Any Amino Acid
CCXXEYACNPACTGA

SEQ ID NO: 10682 - protein, 16 aa, Artificial Sequence
  Synthetically generated peptide
  VARIANT (1)..(16): Xaa = Any Amino Acid
CCXXXEYACNPACTGA

SEQ ID NO: 10683 - protein, 17 aa, Artificial Sequence
  Synthetically generated peptide
  VARIANT (1)..(17): Xaa = Any Amino Acid
CCXXXXEYACNPACTGA

SEQ ID NO: 10684 - protein, 17 aa, Artificial Sequence
  Synthetically generated peptide
  VARIANT (1)..(17): Xaa = Any Amino Acid
CCXXXEXYACNPACTGA

SEQ ID NO: 10685 - protein, 17 aa, Artificial Sequence
  Synthetically generated peptide
  VARIANT (1)..(17): Xaa = Any Amino Acid
CCXXXEYXACNPACTGA

SEQ ID NO: 10686 - protein, 17 aa, Artificial Sequence
  Synthetically generated peptide
  VARIANT (1)..(17): Xaa = Any Amino Acid
CCXXXEYACXNPACTGA

SEQ ID NO: 10687 - protein, 17 aa, Artificial Sequence
  Synthetically generated peptide
  VARIANT (1)..(17): Xaa = Any Amino Acid
CCXXXEYACNXPACTGA

SEQ ID NO: 10688 - protein, 17 aa, Artificial Sequence
  Synthetically generated peptide
  VARIANT (1)..(17): Xaa = Any Amino Acid
CCXXXEYACNPXACTGA

SEQ ID NO: 10689 - protein, 17 aa, Artificial Sequence
  Synthetically generated peptide
  VARIANT (1)..(17): Xaa = Any Amino Acid
CCXXXEYACNPAXCTGA

SEQ ID NO: 10690 - protein, 17 aa, Artificial Sequence
  Synthetically generated peptide
  VARIANT (1)..(17): Xaa = Any Amino Acid
CCXXXEYACNPACXTGA

SEQ ID NO: 10691 - protein, 17 aa, Artificial Sequence
  Synthetically generated peptide
  VARIANT (1)..(17): Xaa = Any Amino Acid
CCXXXEYACNPACTXGA

SEQ ID NO: 10692 - protein, 17 aa, Artificial Sequence
  Synthetically generated peptide
  VARIANT (1)..(17): Xaa = Any Amino Acid
CCXXXEYACNPACTGXA

SEQ ID NO: 10693 - protein, 16 aa, Artificial Sequence
  Synthetically generated peptide
  VARIANT (1)..(16): Xaa = Any Amino Acid
CCXXEXYACNPACTGA

SEQ ID NO: 10694 - protein, 17 aa, Artificial Sequence
  Synthetically generated peptide
  VARIANT (1)..(17): Xaa = Any Amino Acid
CCXXEXXYACNPACTGA

SEQ ID NO: 10695 - protein, 17 aa, Artificial Sequence
  Synthetically generated peptide
  VARIANT (1)..(17): Xaa = Any Amino Acid
CCXXEXYXACNPACTGA

SEQ ID NO: 10696 - protein, 17 aa, Artificial Sequence
  Synthetically generated peptide
  VARIANT (1)..(17): Xaa = Any Amino Acid
CCXXEXYACXNPACTGA

SEQ ID NO: 10697 - protein, 17 aa, Artificial Sequence
  Synthetically generated peptide
  VARIANT (1)..(17): Xaa = Any Amino Acid
CCXXEXYACNXPACTGA

SEQ ID NO: 10698 - protein, 17 aa, Artificial Sequence
  Synthetically generated peptide
  VARIANT (1)..(17): Xaa = Any Amino Acid
CCXXEXYACNPXACTGA

SEQ ID NO: 10699 - protein, 17 aa, Artificial Sequence
  Synthetically generated peptide
  VARIANT (1)..(17): Xaa = Any Amino Acid
CCXXEXYACNPAXCTGA

SEQ ID NO: 10700 - protein, 17 aa, Artificial Sequence
  Synthetically generated peptide
  VARIANT (1)..(17): Xaa = Any Amino Acid
CCXXEXYACNPACXTGA

SEQ ID NO: 10701 - protein, 17 aa, Artificial Sequence
  Synthetically generated peptide
  VARIANT (1)..(17): Xaa = Any Amino Acid
CCXXEXYACNPACTXGA

SEQ ID NO: 10702 - protein, 17 aa, Artificial Sequence
  Synthetically generated peptide
  VARIANT (1)..(17): Xaa = Any Amino Acid
CCXXEXYACNPACTGXA

SEQ ID NO: 10703 - protein, 16 aa, Artificial Sequence
  Synthetically generated peptide
  VARIANT (1)..(16): Xaa = Any Amino Acid
CCXXEYXACNPACTGA

SEQ ID NO: 10704 - protein, 17 aa, Artificial Sequence
  Synthetically generated peptide
  VARIANT (1)..(17): Xaa = Any Amino Acid
CCXXEYXXACNPACTGA

SEQ ID NO: 10705 - protein, 17 aa, Artificial Sequence
  Synthetically generated peptide
  VARIANT (1)..(17): Xaa = Any Amino Acid
CCXXEYXACXNPACTGA

SEQ ID NO: 10706 - protein, 17 aa, Artificial Sequence
  Synthetically generated peptide
  VARIANT (1)..(17): Xaa = Any Amino Acid
CCXXEYXACNXPACTGA

SEQ ID NO: 10707 - protein, 17 aa, Artificial Sequence
  Synthetically generated peptide
  VARIANT (1)..(17): Xaa = Any Amino Acid
CCXXEYXACNPXACTGA

SEQ ID NO: 10708 - protein, 17 aa, Artificial Sequence
  Synthetically generated peptide
  VARIANT (1)..(17): Xaa = Any Amino Acid
CCXXEYXACNPAXCTGA

SEQ ID NO: 10709 - protein, 17 aa, Artificial Sequence
  Synthetically generated peptide
  VARIANT (1)..(17): Xaa = Any Amino Acid
CCXXEYXACNPACXTGA

SEQ ID NO: 10710 - protein, 17 aa, Artificial Sequence
  Synthetically generated peptide
  VARIANT (1)..(17): Xaa = Any Amino Acid
CCXXEYXACNPACTXGA

SEQ ID NO: 10711 - protein, 17 aa, Artificial Sequence
  Synthetically generated peptide
  VARIANT (1)..(17): Xaa = Any Amino Acid
CCXXEYXACNPACTGXA

SEQ ID NO: 10712 - protein, 16 aa, Artificial Sequence
  Synthetically generated peptide
  VARIANT (1)..(16): Xaa = Any Amino Acid
CCXXEYACXNPACTGA

SEQ ID NO: 10713 - protein, 17 aa, Artificial Sequence
  Synthetically generated peptide
  VARIANT (1)..(17): Xaa = Any Amino Acid
CCXXEYACXXNPACTGA

SEQ ID NO: 10714 - protein, 17 aa, Artificial Sequence
  Synthetically generated peptide
  VARIANT (1)..(17): Xaa = Any Amino Acid
CCXXEYACXNXPACTGA

SEQ ID NO: 10715 - protein, 17 aa, Artificial Sequence
  Synthetically generated peptide
  VARIANT (1)..(17): Xaa = Any Amino Acid
CCXXEYACXNPXACTGA

SEQ ID NO: 10716 - protein, 17 aa, Artificial Sequence
  Synthetically generated peptide
  VARIANT (1)..(17): Xaa = Any Amino Acid
CCXXEYACXNPAXCTGA

SEQ ID NO: 10717 - protein, 17 aa, Artificial Sequence
  Synthetically generated peptide
  VARIANT (1)..(17): Xaa = Any Amino Acid
CCXXEYACXNPACXTGA

SEQ ID NO: 10718 - protein, 17 aa, Artificial Sequence
  Synthetically generated peptide
  VARIANT (1)..(17): Xaa = Any Amino Acid
CCXXEYACXNPACTXGA

SEQ ID NO: 10719 - protein, 17 aa, Artificial Sequence
  Synthetically generated peptide
  VARIANT (1)..(17): Xaa = Any Amino Acid
CCXXEYACXNPACTGXA

SEQ ID NO: 10720 - protein, 16 aa, Artificial Sequence
  Synthetically generated peptide
  VARIANT (1)..(16): Xaa = Any Amino Acid
CCXXEYACNXPACTGA

SEQ ID NO: 10721 - protein, 17 aa, Artificial Sequence
  Synthetically generated peptide
  VARIANT (1)..(17): Xaa = Any Amino Acid
CCXXEYACNXXPACTGA

SEQ ID NO: 10722 - protein, 17 aa, Artificial Sequence
  Synthetically generated peptide
  VARIANT (1)..(17): Xaa = Any Amino Acid
CCXXEYACNXPXACTGA

SEQ ID NO: 10723 - protein, 17 aa, Artificial Sequence
  Synthetically generated peptide
  VARIANT (1)..(17): Xaa = Any Amino Acid
CCXXEYACNXPAXCTGA

SEQ ID NO: 10724 - protein, 17 aa, Artificial Sequence
  Synthetically generated peptide
  VARIANT (1)..(17): Xaa = Any Amino Acid
CCXXEYACNXPACXTGA

SEQ ID NO: 10725 - protein, 17 aa, Artificial Sequence
  Synthetically generated peptide
  VARIANT (1)..(17): Xaa = Any Amino Acid
CCXXEYACNXPACTXGA

SEQ ID NO: 10726 - protein, 17 aa, Artificial Sequence
  Synthetically generated peptide
  VARIANT (1)..(17): Xaa = Any Amino Acid
CCXXEYACNXPACTGXA

SEQ ID NO: 10727 - protein, 16 aa, Artificial Sequence
  Synthetically generated peptide
  VARIANT (1)..(16): Xaa = Any Amino Acid
CCXXEYACNPXACTGA

SEQ ID NO: 10728 - protein, 17 aa, Artificial Sequence
  Synthetically generated peptide
  VARIANT (1)..(17): Xaa = Any Amino Acid
CCXXEYACNPXXACTGA

SEQ ID NO: 10729 - protein, 17 aa, Artificial Sequence
  Synthetically generated peptide
  VARIANT (1)..(17): Xaa = Any Amino Acid
CCXXEYACNPXAXCTGA

SEQ ID NO: 10730 - protein, 17 aa, Artificial Sequence
  Synthetically generated peptide
  VARIANT (1)..(17): Xaa = Any Amino Acid
CCXXEYACNPXACXTGA

SEQ ID NO: 10731 - protein, 17 aa, Artificial Sequence
  Synthetically generated peptide
  VARIANT (1)..(17): Xaa = Any Amino Acid
CCXXEYACNPXACTXGA

SEQ ID NO: 10732 - protein, 17 aa, Artificial Sequence
  Synthetically generated peptide
  VARIANT (1)..(17): Xaa = Any Amino Acid
CCXXEYACNPXACTGXA

SEQ ID NO: 10733 - protein, 16 aa, Artificial Sequence
  Synthetically generated peptide
  VARIANT (1)..(16): Xaa = Any Amino Acid
CCXXEYACNPAXCTGA

SEQ ID NO: 10734 - protein, 17 aa, Artificial Sequence
  Synthetically generated peptide
  VARIANT (1)..(17): Xaa = Any Amino Acid
CCXXEYACNPAXXCTGA

SEQ ID NO: 10735 - protein, 17 aa, Artificial Sequence
  Synthetically generated peptide
  VARIANT (1)..(17): Xaa = Any Amino Acid
CCXXEYACNPAXCXTGA

SEQ ID NO: 10736 - protein, 17 aa, Artificial Sequence
  Synthetically generated peptide
  VARIANT (1)..(17): Xaa = Any Amino Acid
CCXXEYACNPAXCTXGA

SEQ ID NO: 10737 - protein, 17 aa, Artificial Sequence
  Synthetically generated peptide
  VARIANT (1)..(17): Xaa = Any Amino Acid
CCXXEYACNPAXCTGXA

SEQ ID NO: 10738 - protein, 16 aa, Artificial Sequence
  Synthetically generated peptide
  VARIANT (1)..(16): Xaa = Any Amino Acid
CCXXEYACNPACXTGA

SEQ ID NO: 10739 - protein, 17 aa, Artificial Sequence
  Synthetically generated peptide
  VARIANT (1)..(17): Xaa = Any Amino Acid
CCXXEYACNPACXXTGA

SEQ ID NO: 10740 - protein, 17 aa, Artificial Sequence
  Synthetically generated peptide
  VARIANT (1)..(17): Xaa = Any Amino Acid
CCXXEYACNPACXTXGA

SEQ ID NO: 10741 - protein, 17 aa, Artificial Sequence
  Synthetically generated peptide
  VARIANT (1)..(17): Xaa = Any Amino Acid
CCXXEYACNPACXTGXA

SEQ ID NO: 10742 - protein, 16 aa, Artificial Sequence
  Synthetically generated peptide
  VARIANT (1)..(16): Xaa = Any Amino Acid
CCXXEYACNPACTXGA

SEQ ID NO: 10743 - protein, 17 aa, Artificial Sequence
  Synthetically generated peptide
  VARIANT (1)..(17): Xaa = Any Amino Acid
CCXXEYACNPACTXXGA

SEQ ID NO: 10744 - protein, 17 aa, Artificial Sequence
  Synthetically generated peptide
  VARIANT (1)..(17): Xaa = Any Amino Acid
CCXXEYACNPACTXGXA

SEQ ID NO: 10745 - protein, 16 aa, Artificial Sequence
  Synthetically generated peptide
  VARIANT (1)..(16): Xaa = Any Amino Acid
CCXXEYACNPACTGXA

SEQ ID NO: 10746 - protein, 17 aa, Artificial Sequence
  Synthetically generated peptide
  VARIANT (1)..(17): Xaa = Any Amino Acid
CCXXEYACNPACTGXXA

SEQ ID NO: 10747 - protein, 15 aa, Artificial Sequence
  Synthetically generated peptide
  VARIANT (1)..(15): Xaa = Any Amino Acid
CCXEXYACNPACTGA

SEQ ID NO: 10748 - protein, 16 aa, Artificial Sequence
  Synthetically generated peptide
  VARIANT (1)..(16): Xaa = Any Amino Acid
CCXEXXYACNPACTGA

SEQ ID NO: 10749 - protein, 17 aa, Artificial Sequence
  Synthetically generated peptide
  VARIANT (1)..(17): Xaa = Any Amino Acid
CCXEXXXYACNPACTGA

SEQ ID NO: 10750 - protein, 17 aa, Artificial Sequence
  Synthetically generated peptide
  VARIANT (1)..(17): Xaa = Any Amino Acid
CCXEXXYXACNPACTGA

SEQ ID NO: 10751 - protein, 17 aa, Artificial Sequence
  Synthetically generated peptide
  VARIANT (1)..(17): Xaa = Any Amino Acid
CCXEXXYACXNPACTGA

SEQ ID NO: 10752 - protein, 17 aa, Artificial Sequence
  Synthetically generated peptide
  VARIANT (1)..(17): Xaa = Any Amino Acid
CCXEXXYACNXPACTGA

SEQ ID NO: 10753 - protein, 17 aa, Artificial Sequence
  Synthetically generated peptide
  VARIANT (1)..(17): Xaa = Any Amino Acid
CCXEXXYACNPXACTGA

SEQ ID NO: 10754 - protein, 17 aa, Artificial Sequence
  Synthetically generated peptide
  VARIANT (1)..(17): Xaa = Any Amino Acid
CCXEXXYACNPAXCTGA

SEQ ID NO: 10755 - protein, 17 aa, Artificial Sequence
  Synthetically generated peptide
  VARIANT (1)..(17): Xaa = Any Amino Acid
CCXEXXYACNPACXTGA

SEQ ID NO: 10756 - protein, 17 aa, Artificial Sequence
  Synthetically generated peptide
  VARIANT (1)..(17): Xaa = Any Amino Acid
CCXEXXYACNPACTXGA

SEQ ID NO: 10757 - protein, 17 aa, Artificial Sequence
  Synthetically generated peptide
  VARIANT (1)..(17): Xaa = Any Amino Acid
CCXEXXYACNPACTGXA

SEQ ID NO: 10758 - protein, 16 aa, Artificial Sequence
  Synthetically generated peptide
  VARIANT (1)..(16): Xaa = Any Amino Acid
CCXEXYXACNPACTGA

SEQ ID NO: 10759 - protein, 17 aa, Artificial Sequence
  Synthetically generated peptide
  VARIANT (1)..(17): Xaa = Any Amino Acid
CCXEXYXXACNPACTGA

SEQ ID NO: 10760 - protein, 17 aa, Artificial Sequence
  Synthetically generated peptide
  VARIANT (1)..(17): Xaa = Any Amino Acid
CCXEXYXACXNPACTGA

SEQ ID NO: 10761 - protein, 17 aa, Artificial Sequence
  Synthetically generated peptide
  VARIANT (1)..(17): Xaa = Any Amino Acid
CCXEXYXACNXPACTGA

SEQ ID NO: 10762 - protein, 17 aa, Artificial Sequence
  Synthetically generated peptide
  VARIANT (1)..(17): Xaa = Any Amino Acid
CCXEXYXACNPXACTGA

SEQ ID NO: 10763 - protein, 17 aa, Artificial Sequence
  Synthetically generated peptide
  VARIANT (1)..(17): Xaa = Any Amino Acid
CCXEXYXACNPAXCTGA

SEQ ID NO: 10764 - protein, 17 aa, Artificial Sequence
  Synthetically generated peptide
  VARIANT (1)..(17): Xaa = Any Amino Acid
CCXEXYXACNPACXTGA

SEQ ID NO: 10765 - protein, 17 aa, Artificial Sequence
  Synthetically generated peptide
  VARIANT (1)..(17): Xaa = Any Amino Acid
CCXEXYXACNPACTXGA

SEQ ID NO: 10766 - protein, 17 aa, Artificial Sequence
  Synthetically generated peptide
  VARIANT (1)..(17): Xaa = Any Amino Acid
CCXEXYXACNPACTGXA

SEQ ID NO: 10767 - protein, 16 aa, Artificial Sequence
  Synthetically generated peptide
  VARIANT (1)..(16): Xaa = Any Amino Acid
CCXEXYACXNPACTGA

SEQ ID NO: 10768 - protein, 17 aa, Artificial Sequence
  Synthetically generated peptide
  VARIANT (1)..(17): Xaa = Any Amino Acid
CCXEXYACXXNPACTGA

SEQ ID NO: 10769 - protein, 17 aa, Artificial Sequence
  Synthetically generated peptide
  VARIANT (1)..(17): Xaa = Any Amino Acid
CCXEXYACXNXPACTGA

SEQ ID NO: 10770 - protein, 17 aa, Artificial Sequence
  Synthetically generated peptide
  VARIANT (1)..(17): Xaa = Any Amino Acid
CCXEXYACXNPXACTGA

SEQ ID NO: 10771 - protein, 17 aa, Artificial Sequence
  Synthetically generated peptide
  VARIANT (1)..(17): Xaa = Any Amino Acid
CCXEXYACXNPAXCTGA

SEQ ID NO: 10772 - protein, 17 aa, Artificial Sequence
  Synthetically generated peptide
  VARIANT (1)..(17): Xaa = Any Amino Acid
CCXEXYACXNPACXTGA

SEQ ID NO: 10773 - protein, 17 aa, Artificial Sequence
  Synthetically generated peptide
  VARIANT (1)..(17): Xaa = Any Amino Acid
CCXEXYACXNPACTXGA

SEQ ID NO: 10774 - protein, 17 aa, Artificial Sequence
  Synthetically generated peptide
  VARIANT (1)..(17): Xaa = Any Amino Acid
CCXEXYACXNPACTGXA

SEQ ID NO: 10775 - protein, 16 aa, Artificial Sequence
  Synthetically generated peptide
  VARIANT (1)..(16): Xaa = Any Amino Acid
CCXEXYACNXPACTGA

SEQ ID NO: 10776 - protein, 17 aa, Artificial Sequence
  Synthetically generated peptide
  VARIANT (1)..(17): Xaa = Any Amino Acid
CCXEXYACNXXPACTGA

SEQ ID NO: 10777 - protein, 17 aa, Artificial Sequence
  Synthetically generated peptide
  VARIANT (1)..(17): Xaa = Any Amino Acid
CCXEXYACNXPXACTGA

SEQ ID NO: 10778 - protein, 17 aa, Artificial Sequence
  Synthetically generated peptide
  VARIANT (1)..(17): Xaa = Any Amino Acid
CCXEXYACNXPAXCTGA

SEQ ID NO: 10779 - protein, 17 aa, Artificial Sequence
  Synthetically generated peptide
  VARIANT (1)..(17): Xaa = Any Amino Acid
CCXEXYACNXPACXTGA

SEQ ID NO: 10780 - protein, 17 aa, Artificial Sequence
  Synthetically generated peptide
  VARIANT (1)..(17): Xaa = Any Amino Acid
CCXEXYACNXPACTXGA

SEQ ID NO: 10781 - protein, 17 aa, Artificial Sequence
  Synthetically generated peptide
  VARIANT (1)..(17): Xaa = Any Amino Acid
CCXEXYACNXPACTGXA

SEQ ID NO: 10782 - protein, 16 aa, Artificial Sequence
  Synthetically generated peptide
  VARIANT (1)..(16): Xaa = Any Amino Acid
CCXEXYACNPXACTGA

SEQ ID NO: 10783 - protein, 17 aa, Artificial Sequence
  Synthetically generated peptide
  VARIANT (1)..(17): Xaa = Any Amino Acid
CCXEXYACNPXXACTGA

SEQ ID NO: 10784 - protein, 17 aa, Artificial Sequence
  Synthetically generated peptide
  VARIANT (1)..(17): Xaa = Any Amino Acid
CCXEXYACNPXAXCTGA

SEQ ID NO: 10785 - protein, 17 aa, Artificial Sequence
  Synthetically generated peptide
  VARIANT (1)..(17): Xaa = Any Amino Acid
CCXEXYACNPXACXTGA

SEQ ID NO: 10786 - protein, 17 aa, Artificial Sequence
  Synthetically generated peptide
  VARIANT (1)..(17): Xaa = Any Amino Acid
CCXEXYACNPXACTXGA

SEQ ID NO: 10787 - protein, 17 aa, Artificial Sequence
  Synthetically generated peptide
  VARIANT (1)..(17): Xaa = Any Amino Acid
CCXEXYACNPXACTGXA

SEQ ID NO: 10788 - protein, 16 aa, Artificial Sequence
  Synthetically generated peptide
  VARIANT (1)..(16): Xaa = Any Amino Acid
CCXEXYACNPAXCTGA

SEQ ID NO: 10789 - protein, 17 aa, Artificial Sequence
  Synthetically generated peptide
  VARIANT (1)..(17): Xaa = Any Amino Acid
CCXEXYACNPAXXCTGA

SEQ ID NO: 10790 - protein, 17 aa, Artificial Sequence
  Synthetically generated peptide
  VARIANT (1)..(17): Xaa = Any Amino Acid
CCXEXYACNPAXCXTGA

SEQ ID NO: 10791 - protein, 17 aa, Artificial Sequence
  Synthetically generated peptide
  VARIANT (1)..(17): Xaa = Any Amino Acid
CCXEXYACNPAXCTXGA

SEQ ID NO: 10792 - protein, 17 aa, Artificial Sequence
  Synthetically generated peptide
  VARIANT (1)..(17): Xaa = Any Amino Acid
CCXEXYACNPAXCTGXA

SEQ ID NO: 10793 - protein, 16 aa, Artificial Sequence
  Synthetically generated peptide
  VARIANT (1)..(16): Xaa = Any Amino Acid
CCXEXYACNPACXTGA

SEQ ID NO: 10794 - protein, 17 aa, Artificial Sequence
  Synthetically generated peptide
  VARIANT (1)..(17): Xaa = Any Amino Acid
CCXEXYACNPACXXTGA

SEQ ID NO: 10795 - protein, 17 aa, Artificial Sequence
  Synthetically generated peptide
  VARIANT (1)..(17): Xaa = Any Amino Acid
CCXEXYACNPACXTXGA

SEQ ID NO: 10796 - protein, 17 aa, Artificial Sequence
  Synthetically generated peptide
  VARIANT (1)..(17): Xaa = Any Amino Acid
CCXEXYACNPACXTGXA

SEQ ID NO: 10797 - protein, 16 aa, Artificial Sequence
  Synthetically generated peptide
  VARIANT (1)..(16): Xaa = Any Amino Acid
CCXEXYACNPACTXGA

SEQ ID NO: 10798 - protein, 17 aa, Artificial Sequence
  Synthetically generated peptide
  VARIANT (1)..(17): Xaa = Any Amino Acid
CCXEXYACNPACTXXGA

SEQ ID NO: 10799 - protein, 17 aa, Artificial Sequence
  Synthetically generated peptide
  VARIANT (1)..(17): Xaa = Any Amino Acid
CCXEXYACNPACTXGXA

SEQ ID NO: 10800 - protein, 16 aa, Artificial Sequence
  Synthetically generated peptide
  VARIANT (1)..(16): Xaa = Any Amino Acid
CCXEXYACNPACTGXA

SEQ ID NO: 10801 - protein, 17 aa, Artificial Sequence
  Synthetically generated peptide
  VARIANT (1)..(17): Xaa = Any Amino Acid
CCXEXYACNPACTGXXA

SEQ ID NO: 10802 - protein, 15 aa, Artificial Sequence
  Synthetically generated peptide
  VARIANT (1)..(15): Xaa = Any Amino Acid
CCXEYXACNPACTGA

SEQ ID NO: 10803 - protein, 16 aa, Artificial Sequence
  Synthetically generated peptide
  VARIANT (1)..(16): Xaa = Any Amino Acid
CCXEYXXACNPACTGA

SEQ ID NO: 10804 - protein, 17 aa, Artificial Sequence
  Synthetically generated peptide
  VARIANT (1)..(17): Xaa = Any Amino Acid
CCXEYXXXACNPACTGA

SEQ ID NO: 10805 - protein, 17 aa, Artificial Sequence
  Synthetically generated peptide
  VARIANT (1)..(17): Xaa = Any Amino Acid
CCXEYXXACXNPACTGA

SEQ ID NO: 10806 - protein, 17 aa, Artificial Sequence
  Synthetically generated peptide
  VARIANT (1)..(17): Xaa = Any Amino Acid
CCXEYXXACNXPACTGA

SEQ ID NO: 10807 - protein, 17 aa, Artificial Sequence
  Synthetically generated peptide
  VARIANT (1)..(17): Xaa = Any Amino Acid
CCXEYXXACNPXACTGA

SEQ ID NO: 10808 - protein, 17 aa, Artificial Sequence
  Synthetically generated peptide
  VARIANT (1)..(17): Xaa = Any Amino Acid
CCXEYXXACNPAXCTGA

SEQ ID NO: 10809 - protein, 17 aa, Artificial Sequence
  Synthetically generated peptide
  VARIANT (1)..(17): Xaa = Any Amino Acid
CCXEYXXACNPACXTGA

SEQ ID NO: 10810 - protein, 17 aa, Artificial Sequence
  Synthetically generated peptide
  VARIANT (1)..(17): Xaa = Any Amino Acid
CCXEYXXACNPACTXGA

SEQ ID NO: 10811 - protein, 17 aa, Artificial Sequence
  Synthetically generated peptide
  VARIANT (1)..(17): Xaa = Any Amino Acid
CCXEYXXACNPACTGXA

SEQ ID NO: 10812 - protein, 16 aa, Artificial Sequence
  Synthetically generated peptide
  VARIANT (1)..(16): Xaa = Any Amino Acid
CCXEYXACXNPACTGA

SEQ ID NO: 10813 - protein, 17 aa, Artificial Sequence
  Synthetically generated peptide
  VARIANT (1)..(17): Xaa = Any Amino Acid
CCXEYXACXXNPACTGA

SEQ ID NO: 10814 - protein, 17 aa, Artificial Sequence
  Synthetically generated peptide
  VARIANT (1)..(17): Xaa = Any Amino Acid
CCXEYXACXNXPACTGA

SEQ ID NO: 10815 - protein, 17 aa, Artificial Sequence
  Synthetically generated peptide
  VARIANT (1)..(17): Xaa = Any Amino Acid
CCXEYXACXNPXACTGA

SEQ ID NO: 10816 - protein, 17 aa, Artificial Sequence
  Synthetically generated peptide
  VARIANT (1)..(17): Xaa = Any Amino Acid
CCXEYXACXNPAXCTGA

SEQ ID NO: 10817 - protein, 17 aa, Artificial Sequence
  Synthetically generated peptide
  VARIANT (1)..(17): Xaa = Any Amino Acid
CCXEYXACXNPACXTGA

SEQ ID NO: 10818 - protein, 17 aa, Artificial Sequence
  Synthetically generated peptide
  VARIANT (1)..(17): Xaa = Any Amino Acid
CCXEYXACXNPACTXGA

SEQ ID NO: 10819 - protein, 17 aa, Artificial Sequence
  Synthetically generated peptide
  VARIANT (1)..(17): Xaa = Any Amino Acid
CCXEYXACXNPACTGXA

SEQ ID NO: 10820 - protein, 16 aa, Artificial Sequence
  Synthetically generated peptide
  VARIANT (1)..(16): Xaa = Any Amino Acid
CCXEYXACNXPACTGA

SEQ ID NO: 10821 - protein, 17 aa, Artificial Sequence
  Synthetically generated peptide
  VARIANT (1)..(17): Xaa = Any Amino Acid
CCXEYXACNXXPACTGA

SEQ ID NO: 10822 - protein, 17 aa, Artificial Sequence
  Synthetically generated peptide
  VARIANT (1)..(17): Xaa = Any Amino Acid
CCXEYXACNXPXACTGA

SEQ ID NO: 10823 - protein, 17 aa, Artificial Sequence
  Synthetically generated peptide
  VARIANT (1)..(17): Xaa = Any Amino Acid
CCXEYXACNXPAXCTGA

SEQ ID NO: 10824 - protein, 17 aa, Artificial Sequence
  Synthetically generated peptide
  VARIANT (1)..(17): Xaa = Any Amino Acid
CCXEYXACNXPACXTGA

SEQ ID NO: 10825 - protein, 17 aa, Artificial Sequence
  Synthetically generated peptide
  VARIANT (1)..(17): Xaa = Any Amino Acid
CCXEYXACNXPACTXGA

SEQ ID NO: 10826 - protein, 17 aa, Artificial Sequence
  Synthetically generated peptide
  VARIANT (1)..(17): Xaa = Any Amino Acid
CCXEYXACNXPACTGXA

SEQ ID NO: 10827 - protein, 16 aa, Artificial Sequence
  Synthetically generated peptide
  VARIANT (1)..(16): Xaa = Any Amino Acid
CCXEYXACNPXACTGA

SEQ ID NO: 10828 - protein, 17 aa, Artificial Sequence
  Synthetically generated peptide
  VARIANT (1)..(17): Xaa = Any Amino Acid
CCXEYXACNPXXACTGA

SEQ ID NO: 10829 - protein, 17 aa, Artificial Sequence
  Synthetically generated peptide
  VARIANT (1)..(17): Xaa = Any Amino Acid
CCXEYXACNPXAXCTGA

SEQ ID NO: 10830 - protein, 17 aa, Artificial Sequence
  Synthetically generated peptide
  VARIANT (1)..(17): Xaa = Any Amino Acid
CCXEYXACNPXACXTGA

SEQ ID NO: 10831 - protein, 17 aa, Artificial Sequence
  Synthetically generated peptide
  VARIANT (1)..(17): Xaa = Any Amino Acid
CCXEYXACNPXACTXGA

SEQ ID NO: 10832 - protein, 17 aa, Artificial Sequence
  Synthetically generated peptide
  VARIANT (1)..(17): Xaa = Any Amino Acid
CCXEYXACNPXACTGXA

SEQ ID NO: 10833 - protein, 16 aa, Artificial Sequence
  Synthetically generated peptide
  VARIANT (1)..(16): Xaa = Any Amino Acid
CCXEYXACNPAXCTGA

SEQ ID NO: 10834 - protein, 17 aa, Artificial Sequence
  Synthetically generated peptide
  VARIANT (1)..(17): Xaa = Any Amino Acid
CCXEYXACNPAXXCTGA

SEQ ID NO: 10835 - protein, 17 aa, Artificial Sequence
  Synthetically generated peptide
  VARIANT (1)..(17): Xaa = Any Amino Acid
CCXEYXACNPAXCXTGA

SEQ ID NO: 10836 - protein, 17 aa, Artificial Sequence
  Synthetically generated peptide
  VARIANT (1)..(17): Xaa = Any Amino Acid
CCXEYXACNPAXCTXGA

SEQ ID NO: 10837 - protein, 17 aa, Artificial Sequence
  Synthetically generated peptide
  VARIANT (1)..(17): Xaa = Any Amino Acid
CCXEYXACNPAXCTGXA

SEQ ID NO: 10838 - protein, 16 aa, Artificial Sequence
  Synthetically generated peptide
  VARIANT (1)..(16): Xaa = Any Amino Acid
CCXEYXACNPACXTGA

SEQ ID NO: 10839 - protein, 17 aa, Artificial Sequence
  Synthetically generated peptide
  VARIANT (1)..(17): Xaa = Any Amino Acid
CCXEYXACNPACXXTGA

SEQ ID NO: 10840 - protein, 17 aa, Artificial Sequence
  Synthetically generated peptide
  VARIANT (1)..(17): Xaa = Any Amino Acid
CCXEYXACNPACXTXGA

SEQ ID NO: 10841 - protein, 17 aa, Artificial Sequence
  Synthetically generated peptide
  VARIANT (1)..(17): Xaa = Any Amino Acid
CCXEYXACNPACXTGXA

SEQ ID NO: 10842 - protein, 16 aa, Artificial Sequence
  Synthetically generated peptide
  VARIANT (1)..(16): Xaa = Any Amino Acid
CCXEYXACNPACTXGA

SEQ ID NO: 10843 - protein, 17 aa, Artificial Sequence
  Synthetically generated peptide
  VARIANT (1)..(17): Xaa = Any Amino Acid
CCXEYXACNPACTXXGA

SEQ ID NO: 10844 - protein, 17 aa, Artificial Sequence
  Synthetically generated peptide
  VARIANT (1)..(17): Xaa = Any Amino Acid
CCXEYXACNPACTXGXA

SEQ ID NO: 10845 - protein, 16 aa, Artificial Sequence
  Synthetically generated peptide
  VARIANT (1)..(16): Xaa = Any Amino Acid
CCXEYXACNPACTGXA

SEQ ID NO: 10846 - protein, 17 aa, Artificial Sequence
  Synthetically generated peptide
  VARIANT (1)..(17): Xaa = Any Amino Acid
CCXEYXACNPACTGXXA

SEQ ID NO: 10847 - protein, 15 aa, Artificial Sequence
  Synthetically generated peptide
  VARIANT (1)..(15): Xaa = Any Amino Acid
CCXEYACXNPACTGA

SEQ ID NO: 10848 - protein, 16 aa, Artificial Sequence
  Synthetically generated peptide
  VARIANT (1)..(16): Xaa = Any Amino Acid
CCXEYACXXNPACTGA

SEQ ID NO: 10849 - protein, 17 aa, Artificial Sequence
  Synthetically generated peptide
  VARIANT (1)..(17): Xaa = Any Amino Acid
CCXEYACXXXNPACTGA

SEQ ID NO: 10850 - protein, 17 aa, Artificial Sequence
  Synthetically generated peptide
  VARIANT (1)..(17): Xaa = Any Amino Acid
CCXEYACXXNXPACTGA

SEQ ID NO: 10851 - protein, 17 aa, Artificial Sequence
  Synthetically generated peptide
  VARIANT (1)..(17): Xaa = Any Amino Acid
CCXEYACXXNPXACTGA

SEQ ID NO: 10852 - protein, 17 aa, Artificial Sequence
  Synthetically generated peptide
  VARIANT (1)..(17): Xaa = Any Amino Acid
CCXEYACXXNPAXCTGA

SEQ ID NO: 10853 - protein, 17 aa, Artificial Sequence
  Synthetically generated peptide
  VARIANT (1)..(17): Xaa = Any Amino Acid
CCXEYACXXNPACXTGA

SEQ ID NO: 10854 - protein, 17 aa, Artificial Sequence
  Synthetically generated peptide
  VARIANT (1)..(17): Xaa = Any Amino Acid
CCXEYACXXNPACTXGA

SEQ ID NO: 10855 - protein, 17 aa, Artificial Sequence
  Synthetically generated peptide
  VARIANT (1)..(17): Xaa = Any Amino Acid
CCXEYACXXNPACTGXA

SEQ ID NO: 10856 - protein, 16 aa, Artificial Sequence
  Synthetically generated peptide
  VARIANT (1)..(16): Xaa = Any Amino Acid
CCXEYACXNXPACTGA

SEQ ID NO: 10857 - protein, 17 aa, Artificial Sequence
  Synthetically generated peptide
  VARIANT (1)..(17): Xaa = Any Amino Acid
CCXEYACXNXXPACTGA

SEQ ID NO: 10858 - protein, 17 aa, Artificial Sequence
  Synthetically generated peptide
  VARIANT (1)..(17): Xaa = Any Amino Acid
CCXEYACXNXPXACTGA

SEQ ID NO: 10859 - protein, 17 aa, Artificial Sequence
  Synthetically generated peptide
  VARIANT (1)..(17): Xaa = Any Amino Acid
CCXEYACXNXPAXCTGA

SEQ ID NO: 10860 - protein, 17 aa, Artificial Sequence
  Synthetically generated peptide
  VARIANT (1)..(17): Xaa = Any Amino Acid
CCXEYACXNXPACXTGA

SEQ ID NO: 10861 - protein, 17 aa, Artificial Sequence
  Synthetically generated peptide
  VARIANT (1)..(17): Xaa = Any Amino Acid
CCXEYACXNXPACTXGA

SEQ ID NO: 10862 - protein, 17 aa, Artificial Sequence
  Synthetically generated peptide
  VARIANT (1)..(17): Xaa = Any Amino Acid
CCXEYACXNXPACTGXA

SEQ ID NO: 10863 - protein, 16 aa, Artificial Sequence
  Synthetically generated peptide
  VARIANT (1)..(16): Xaa = Any Amino Acid
CCXEYACXNPXACTGA

SEQ ID NO: 10864 - protein, 17 aa, Artificial Sequence
  Synthetically generated peptide
  VARIANT (1)..(17): Xaa = Any Amino Acid
CCXEYACXNPXXACTGA

SEQ ID NO: 10865 - protein, 17 aa, Artificial Sequence
  Synthetically generated peptide
  VARIANT (1)..(17): Xaa = Any Amino Acid
CCXEYACXNPXAXCTGA

SEQ ID NO: 10866 - protein, 17 aa, Artificial Sequence
  Synthetically generated peptide
  VARIANT (1)..(17): Xaa = Any Amino Acid
CCXEYACXNPXACXTGA

SEQ ID NO: 10867 - protein, 17 aa, Artificial Sequence
  Synthetically generated peptide
  VARIANT (1)..(17): Xaa = Any Amino Acid
CCXEYACXNPXACTXGA

SEQ ID NO: 10868 - protein, 17 aa, Artificial Sequence
  Synthetically generated peptide
  VARIANT (1)..(17): Xaa = Any Amino Acid
CCXEYACXNPXACTGXA

SEQ ID NO: 10869 - protein, 16 aa, Artificial Sequence
  Synthetically generated peptide
  VARIANT (1)..(16): Xaa = Any Amino Acid
CCXEYACXNPAXCTGA

SEQ ID NO: 10870 - protein, 17 aa, Artificial Sequence
  Synthetically generated peptide
  VARIANT (1)..(17): Xaa = Any Amino Acid
CCXEYACXNPAXXCTGA

SEQ ID NO: 10871 - protein, 17 aa, Artificial Sequence
  Synthetically generated peptide
  VARIANT (1)..(17): Xaa = Any Amino Acid
CCXEYACXNPAXCXTGA

SEQ ID NO: 10872 - protein, 17 aa, Artificial Sequence
  Synthetically generated peptide
  VARIANT (1)..(17): Xaa = Any Amino Acid
CCXEYACXNPAXCTXGA

SEQ ID NO: 10873 - protein, 17 aa, Artificial Sequence
  Synthetically generated peptide
  VARIANT (1)..(17): Xaa = Any Amino Acid
CCXEYACXNPAXCTGXA

SEQ ID NO: 10874 - protein, 16 aa, Artificial Sequence
  Synthetically generated peptide
  VARIANT (1)..(16): Xaa = Any Amino Acid
CCXEYACXNPACXTGA

SEQ ID NO: 10875 - protein, 17 aa, Artificial Sequence
  Synthetically generated peptide
  VARIANT (1)..(17): Xaa = Any Amino Acid
CCXEYACXNPACXXTGA

SEQ ID NO: 10876 - protein, 17 aa, Artificial Sequence
  Synthetically generated peptide
  VARIANT (1)..(17): Xaa = Any Amino Acid
CCXEYACXNPACXTXGA

SEQ ID NO: 10877 - protein, 17 aa, Artificial Sequence
  Synthetically generated peptide
  VARIANT (1)..(17): Xaa = Any Amino Acid
CCXEYACXNPACXTGXA

SEQ ID NO: 10878 - protein, 16 aa, Artificial Sequence
  Synthetically generated peptide
  VARIANT (1)..(16): Xaa = Any Amino Acid
CCXEYACXNPACTXGA

SEQ ID NO: 10879 - protein, 17 aa, Artificial Sequence
  Synthetically generated peptide
  VARIANT (1)..(17): Xaa = Any Amino Acid
CCXEYACXNPACTXXGA

SEQ ID NO: 10880 - protein, 17 aa, Artificial Sequence
  Synthetically generated peptide
  VARIANT (1)..(17): Xaa = Any Amino Acid
CCXEYACXNPACTXGXA

SEQ ID NO: 10881 - protein, 16 aa, Artificial Sequence
  Synthetically generated peptide
  VARIANT (1)..(16): Xaa = Any Amino Acid
CCXEYACXNPACTGXA

SEQ ID NO: 10882 - protein, 17 aa, Artificial Sequence
  Synthetically generated peptide
  VARIANT (1)..(17): Xaa = Any Amino Acid
CCXEYACXNPACTGXXA

SEQ ID NO: 10883 - protein, 15 aa, Artificial Sequence
  Synthetically generated peptide
  VARIANT (1)..(15): Xaa = Any Amino Acid
CCXEYACNXPACTGA

SEQ ID NO: 10884 - protein, 16 aa, Artificial Sequence
  Synthetically generated peptide
  VARIANT (1)..(16): Xaa = Any Amino Acid
CCXEYACNXXPACTGA

SEQ ID NO: 10885 - protein, 17 aa, Artificial Sequence
  Synthetically generated peptide
  VARIANT (1)..(17): Xaa = Any Amino Acid
CCXEYACNXXXPACTGA

SEQ ID NO: 10886 - protein, 17 aa, Artificial Sequence
  Synthetically generated peptide
  VARIANT (1)..(17): Xaa = Any Amino Acid
CCXEYACNXXPXACTGA

SEQ ID NO: 10887 - protein, 17 aa, Artificial Sequence
  Synthetically generated peptide
  VARIANT (1)..(17): Xaa = Any Amino Acid
CCXEYACNXXPAXCTGA

SEQ ID NO: 10888 - protein, 17 aa, Artificial Sequence
  Synthetically generated peptide
  VARIANT (1)..(17): Xaa = Any Amino Acid
CCXEYACNXXPACXTGA

SEQ ID NO: 10889 - protein, 17 aa, Artificial Sequence
  Synthetically generated peptide
  VARIANT (1)..(17): Xaa = Any Amino Acid
CCXEYACNXXPACTXGA

SEQ ID NO: 10890 - protein, 17 aa, Artificial Sequence
  Synthetically generated peptide
  VARIANT (1)..(17): Xaa = Any Amino Acid
CCXEYACNXXPACTGXA

SEQ ID NO: 10891 - protein, 16 aa, Artificial Sequence
  Synthetically generated peptide
  VARIANT (1)..(16): Xaa = Any Amino Acid
CCXEYACNXPXACTGA

SEQ ID NO: 10892 - protein, 17 aa, Artificial Sequence
  Synthetically generated peptide
  VARIANT (1)..(17): Xaa = Any Amino Acid
CCXEYACNXPXXACTGA

SEQ ID NO: 10893 - protein, 17 aa, Artificial Sequence
  Synthetically generated peptide
  VARIANT (1)..(17): Xaa = Any Amino Acid
CCXEYACNXPXAXCTGA

SEQ ID NO: 10894 - protein, 17 aa, Artificial Sequence
  Synthetically generated peptide
  VARIANT (1)..(17): Xaa = Any Amino Acid
CCXEYACNXPXACXTGA

SEQ ID NO: 10895 - protein, 17 aa, Artificial Sequence
  Synthetically generated peptide
  VARIANT (1)..(17): Xaa = Any Amino Acid
CCXEYACNXPXACTXGA

SEQ ID NO: 10896 - protein, 17 aa, Artificial Sequence
  Synthetically generated peptide
  VARIANT (1)..(17): Xaa = Any Amino Acid
CCXEYACNXPXACTGXA

SEQ ID NO: 10897 - protein, 16 aa, Artificial Sequence
  Synthetically generated peptide
  VARIANT (1)..(16): Xaa = Any Amino Acid
CCXEYACNXPAXCTGA

SEQ ID NO: 10898 - protein, 17 aa, Artificial Sequence
  Synthetically generated peptide
  VARIANT (1)..(17): Xaa = Any Amino Acid
CCXEYACNXPAXXCTGA

SEQ ID NO: 10899 - protein, 17 aa, Artificial Sequence
  Synthetically generated peptide
  VARIANT (1)..(17): Xaa = Any Amino Acid
CCXEYACNXPAXCXTGA

SEQ ID NO: 10900 - protein, 17 aa, Artificial Sequence
  Synthetically generated peptide
  VARIANT (1)..(17): Xaa = Any Amino Acid
CCXEYACNXPAXCTXGA

SEQ ID NO: 10901 - protein, 17 aa, Artificial Sequence
  Synthetically generated peptide
  VARIANT (1)..(17): Xaa = Any Amino Acid
CCXEYACNXPAXCTGXA

SEQ ID NO: 10902 - protein, 16 aa, Artificial Sequence
  Synthetically generated peptide
  VARIANT (1)..(16): Xaa = Any Amino Acid
CCXEYACNXPACXTGA

SEQ ID NO: 10903 - protein, 17 aa, Artificial Sequence
  Synthetically generated peptide
  VARIANT (1)..(17): Xaa = Any Amino Acid
CCXEYACNXPACXXTGA

SEQ ID NO: 10904 - protein, 17 aa, Artificial Sequence
  Synthetically generated peptide
  VARIANT (1)..(17): Xaa = Any Amino Acid
CCXEYACNXPACXTXGA

SEQ ID NO: 10905 - protein, 17 aa, Artificial Sequence
  Synthetically generated peptide
  VARIANT (1)..(17): Xaa = Any Amino Acid
CCXEYACNXPACXTGXA

SEQ ID NO: 10906 - protein, 16 aa, Artificial Sequence
  Synthetically generated peptide
  VARIANT (1)..(16): Xaa = Any Amino Acid
CCXEYACNXPACTXGA

SEQ ID NO: 10907 - protein, 17 aa, Artificial Sequence
  Synthetically generated peptide
  VARIANT (1)..(17): Xaa = Any Amino Acid
CCXEYACNXPACTXXGA

SEQ ID NO: 10908 - protein, 17 aa, Artificial Sequence
  Synthetically generated peptide
  VARIANT (1)..(17): Xaa = Any Amino Acid
CCXEYACNXPACTXGXA

SEQ ID NO: 10909 - protein, 16 aa, Artificial Sequence
  Synthetically generated peptide
  VARIANT (1)..(16): Xaa = Any Amino Acid
CCXEYACNXPACTGXA

SEQ ID NO: 10910 - protein, 17 aa, Artificial Sequence
  Synthetically generated peptide
  VARIANT (1)..(17): Xaa = Any Amino Acid
CCXEYACNXPACTGXXA

SEQ ID NO: 10911 - protein, 15 aa, Artificial Sequence
  Synthetically generated peptide
  VARIANT (1)..(15): Xaa = Any Amino Acid
CCXEYACNPXACTGA

SEQ ID NO: 10912 - protein, 16 aa, Artificial Sequence
  Synthetically generated peptide
  VARIANT (1)..(16): Xaa = Any Amino Acid
CCXEYACNPXXACTGA

SEQ ID NO: 10913 - protein, 17 aa, Artificial Sequence
  Synthetically generated peptide
  VARIANT (1)..(17): Xaa = Any Amino Acid
CCXEYACNPXXXACTGA

SEQ ID NO: 10914 - protein, 17 aa, Artificial Sequence
  Synthetically generated peptide
  VARIANT (1)..(17): Xaa = Any Amino Acid
CCXEYACNPXXAXCTGA

SEQ ID NO: 10915 - protein, 17 aa, Artificial Sequence
  Synthetically generated peptide
  VARIANT (1)..(17): Xaa = Any Amino Acid
CCXEYACNPXXACXTGA

SEQ ID NO: 10916 - protein, 17 aa, Artificial Sequence
  Synthetically generated peptide
  VARIANT (1)..(17): Xaa = Any Amino Acid
CCXEYACNPXXACTXGA

SEQ ID NO: 10917 - protein, 17 aa, Artificial Sequence
  Synthetically generated peptide
  VARIANT (1)..(17): Xaa = Any Amino Acid
CCXEYACNPXXACTGXA

SEQ ID NO: 10918 - protein, 16 aa, Artificial Sequence
  Synthetically generated peptide
  VARIANT (1)..(16): Xaa = Any Amino Acid
CCXEYACNPXAXCTGA

SEQ ID NO: 10919 - protein, 17 aa, Artificial Sequence
  Synthetically generated peptide
  VARIANT (1)..(17): Xaa = Any Amino Acid
CCXEYACNPXAXXCTGA

SEQ ID NO: 10920 - protein, 17 aa, Artificial Sequence
  Synthetically generated peptide
  VARIANT (1)..(17): Xaa = Any Amino Acid
CCXEYACNPXAXCXTGA

SEQ ID NO: 10921 - protein, 17 aa, Artificial Sequence
  Synthetically generated peptide
  VARIANT (1)..(17): Xaa = Any Amino Acid
CCXEYACNPXAXCTXGA

SEQ ID NO: 10922 - protein, 17 aa, Artificial Sequence
  Synthetically generated peptide
  VARIANT (1)..(17): Xaa = Any Amino Acid
CCXEYACNPXAXCTGXA

SEQ ID NO: 10923 - protein, 16 aa, Artificial Sequence
  Synthetically generated peptide
  VARIANT (1)..(16): Xaa = Any Amino Acid
CCXEYACNPXACXTGA

SEQ ID NO: 10924 - protein, 17 aa, Artificial Sequence
  Synthetically generated peptide
  VARIANT (1)..(17): Xaa = Any Amino Acid
CCXEYACNPXACXXTGA

SEQ ID NO: 10925 - protein, 17 aa, Artificial Sequence
  Synthetically generated peptide
  VARIANT (1)..(17): Xaa = Any Amino Acid
CCXEYACNPXACXTXGA

SEQ ID NO: 10926 - protein, 17 aa, Artificial Sequence
  Synthetically generated peptide
  VARIANT (1)..(17): Xaa = Any Amino Acid
CCXEYACNPXACXTGXA

SEQ ID NO: 10927 - protein, 16 aa, Artificial Sequence
  Synthetically generated peptide
  VARIANT (1)..(16): Xaa = Any Amino Acid
CCXEYACNPXACTXGA

SEQ ID NO: 10928 - protein, 17 aa, Artificial Sequence
  Synthetically generated peptide
  VARIANT (1)..(17): Xaa = Any Amino Acid
CCXEYACNPXACTXXGA

SEQ ID NO: 10929 - protein, 17 aa, Artificial Sequence
  Synthetically generated peptide
  VARIANT (1)..(17): Xaa = Any Amino Acid
CCXEYACNPXACTXGXA

SEQ ID NO: 10930 - protein, 16 aa, Artificial Sequence
  Synthetically generated peptide
  VARIANT (1)..(16): Xaa = Any Amino Acid
CCXEYACNPXACTGXA

SEQ ID NO: 10931 - protein, 17 aa, Artificial Sequence
  Synthetically generated peptide
  VARIANT (1)..(17): Xaa = Any Amino Acid
CCXEYACNPXACTGXXA

SEQ ID NO: 10932 - protein, 15 aa, Artificial Sequence
  Synthetically generated peptide
  VARIANT (1)..(15): Xaa = Any Amino Acid
CCXEYACNPAXCTGA

SEQ ID NO: 10933 - protein, 16 aa, Artificial Sequence
  Synthetically generated peptide
  VARIANT (1)..(16): Xaa = Any Amino Acid
CCXEYACNPAXXCTGA

SEQ ID NO: 10934 - protein, 17 aa, Artificial Sequence
  Synthetically generated peptide
  VARIANT (1)..(17): Xaa = Any Amino Acid
CCXEYACNPAXXXCTGA

SEQ ID NO: 10935 - protein, 17 aa, Artificial Sequence
  Synthetically generated peptide
  VARIANT (1)..(17): Xaa = Any Amino Acid
CCXEYACNPAXXCXTGA

SEQ ID NO: 10936 - protein, 17 aa, Artificial Sequence
  Synthetically generated peptide
  VARIANT (1)..(17): Xaa = Any Amino Acid
CCXEYACNPAXXCTXGA

SEQ ID NO: 10937 - protein, 17 aa, Artificial Sequence
  Synthetically generated peptide
  VARIANT (1)..(17): Xaa = Any Amino Acid
CCXEYACNPAXXCTGXA

SEQ ID NO: 10938 - protein, 16 aa, Artificial Sequence
  Synthetically generated peptide
  VARIANT (1)..(16): Xaa = Any Amino Acid
CCXEYACNPAXCXTGA

SEQ ID NO: 10939 - protein, 17 aa, Artificial Sequence
  Synthetically generated peptide
  VARIANT (1)..(17): Xaa = Any Amino Acid
CCXEYACNPAXCXXTGA

SEQ ID NO: 10940 - protein, 17 aa, Artificial Sequence
  Synthetically generated peptide
  VARIANT (1)..(17): Xaa = Any Amino Acid
CCXEYACNPAXCXTXGA

SEQ ID NO: 10941 - protein, 17 aa, Artificial Sequence
  Synthetically generated peptide
  VARIANT (1)..(17): Xaa = Any Amino Acid
CCXEYACNPAXCXTGXA

SEQ ID NO: 10942 - protein, 16 aa, Artificial Sequence
  Synthetically generated peptide
  VARIANT (1)..(16): Xaa = Any Amino Acid
CCXEYACNPAXCTXGA

SEQ ID NO: 10943 - protein, 17 aa, Artificial Sequence
  Synthetically generated peptide
  VARIANT (1)..(17): Xaa = Any Amino Acid
CCXEYACNPAXCTXXGA

SEQ ID NO: 10944 - protein, 17 aa, Artificial Sequence
  Synthetically generated peptide
  VARIANT (1)..(17): Xaa = Any Amino Acid
CCXEYACNPAXCTXGXA

SEQ ID NO: 10945 - protein, 16 aa, Artificial Sequence
  Synthetically generated peptide
  VARIANT (1)..(16): Xaa = Any Amino Acid
CCXEYACNPAXCTGXA

SEQ ID NO: 10946 - protein, 17 aa, Artificial Sequence
  Synthetically generated peptide
  VARIANT (1)..(17): Xaa = Any Amino Acid
CCXEYACNPAXCTGXXA

SEQ ID NO: 10947 - protein, 15 aa, Artificial Sequence
  Synthetically generated peptide
  VARIANT (1)..(15): Xaa = Any Amino Acid
CCXEYACNPACXTGA

SEQ ID NO: 10948 - protein, 16 aa, Artificial Sequence
  Synthetically generated peptide
  VARIANT (1)..(16): Xaa = Any Amino Acid
CCXEYACNPACXXTGA

SEQ ID NO: 10949 - protein, 17 aa, Artificial Sequence
  Synthetically generated peptide
  VARIANT (1)..(17): Xaa = Any Amino Acid
CCXEYACNPACXXXTGA

SEQ ID NO: 10950 - protein, 17 aa, Artificial Sequence
  Synthetically generated peptide
  VARIANT (1)..(17): Xaa = Any Amino Acid
CCXEYACNPACXXTXGA

SEQ ID NO: 10951 - protein, 17 aa, Artificial Sequence
  Synthetically generated peptide
  VARIANT (1)..(17): Xaa = Any Amino Acid
CCXEYACNPACXXTGXA

SEQ ID NO: 10952 - protein, 16 aa, Artificial Sequence
  Synthetically generated peptide
  VARIANT (1)..(16): Xaa = Any Amino Acid
CCXEYACNPACXTXGA

SEQ ID NO: 10953 - protein, 17 aa, Artificial Sequence
  Synthetically generated peptide
  VARIANT (1)..(17): Xaa = Any Amino Acid
CCXEYACNPACXTXXGA

SEQ ID NO: 10954 - protein, 17 aa, Artificial Sequence
  Synthetically generated peptide
  VARIANT (1)..(17): Xaa = Any Amino Acid
CCXEYACNPACXTXGXA

SEQ ID NO: 10955 - protein, 16 aa, Artificial Sequence
  Synthetically generated peptide
  VARIANT (1)..(16): Xaa = Any Amino Acid
CCXEYACNPACXTGXA

SEQ ID NO: 10956 - protein, 17 aa, Artificial Sequence
  Synthetically generated peptide
  VARIANT (1)..(17): Xaa = Any Amino Acid
CCXEYACNPACXTGXXA

SEQ ID NO: 10957 - protein, 15 aa, Artificial Sequence
  Synthetically generated peptide
  VARIANT (1)..(15): Xaa = Any Amino Acid
CCXEYACNPACTXGA

SEQ ID NO: 10958 - protein, 16 aa, Artificial Sequence
  Synthetically generated peptide
  VARIANT (1)..(16): Xaa = Any Amino Acid
CCXEYACNPACTXXGA

SEQ ID NO: 10959 - protein, 17 aa, Artificial Sequence
  Synthetically generated peptide
  VARIANT (1)..(17): Xaa = Any Amino Acid
CCXEYACNPACTXXXGA

SEQ ID NO: 10960 - protein, 17 aa, Artificial Sequence
  Synthetically generated peptide
  VARIANT (1)..(17): Xaa = Any Amino Acid
CCXEYACNPACTXXGXA

SEQ ID NO: 10961 - protein, 16 aa, Artificial Sequence
  Synthetically generated peptide
  VARIANT (1)..(16): Xaa = Any Amino Acid
CCXEYACNPACTXGXA

SEQ ID NO: 10962 - protein, 17 aa, Artificial Sequence
  Synthetically generated peptide
  VARIANT (1)..(17): Xaa = Any Amino Acid
CCXEYACNPACTXGXXA

SEQ ID NO: 10963 - protein, 15 aa, Artificial Sequence
  Synthetically generated peptide
  VARIANT (1)..(15): Xaa = Any Amino Acid
CCXEYACNPACTGXA

SEQ ID NO: 10964 - protein, 16 aa, Artificial Sequence
  Synthetically generated peptide
  VARIANT (1)..(16): Xaa = Any Amino Acid
CCXEYACNPACTGXXA

SEQ ID NO: 10965 - protein, 17 aa, Artificial Sequence
  Synthetically generated peptide
  VARIANT (1)..(17): Xaa = Any Amino Acid
CCXEYACNPACTGXXXA

SEQ ID NO: 10966 - protein, 14 aa, Artificial Sequence
  Synthetically generated peptide
  VARIANT (1)..(14): Xaa = Any Amino Acid
CCEXYACNPACTGA

SEQ ID NO: 10967 - protein, 15 aa, Artificial Sequence
  Synthetically generated peptide
  VARIANT (1)..(15): Xaa = Any Amino Acid
CCEXXYACNPACTGA

SEQ ID NO: 10968 - protein, 16 aa, Artificial Sequence
  Synthetically generated peptide
  VARIANT (1)..(16): Xaa = Any Amino Acid
CCEXXXYACNPACTGA

SEQ ID NO: 10969 - protein, 17 aa, Artificial Sequence
  Synthetically generated peptide
  VARIANT (1)..(17): Xaa = Any Amino Acid
CCEXXXXYACNPACTGA

SEQ ID NO: 10970 - protein, 17 aa, Artificial Sequence
  Synthetically generated peptide
  VARIANT (1)..(17): Xaa = Any Amino Acid
CCEXXXYXACNPACTGA

SEQ ID NO: 10971 - protein, 17 aa, Artificial Sequence
  Synthetically generated peptide
  VARIANT (1)..(17): Xaa = Any Amino Acid
CCEXXXYACXNPACTGA

SEQ ID NO: 10972 - protein, 17 aa, Artificial Sequence
  Synthetically generated peptide
  VARIANT (1)..(17): Xaa = Any Amino Acid
CCEXXXYACNXPACTGA

SEQ ID NO: 10973 - protein, 17 aa, Artificial Sequence
  Synthetically generated peptide
  VARIANT (1)..(17): Xaa = Any Amino Acid
CCEXXXYACNPXACTGA

SEQ ID NO: 10974 - protein, 17 aa, Artificial Sequence
  Synthetically generated peptide
  VARIANT (1)..(17): Xaa = Any Amino Acid
CCEXXXYACNPAXCTGA

SEQ ID NO: 10975 - protein, 17 aa, Artificial Sequence
  Synthetically generated peptide
  VARIANT (1)..(17): Xaa = Any Amino Acid
CCEXXXYACNPACXTGA

SEQ ID NO: 10976 - protein, 17 aa, Artificial Sequence
  Synthetically generated peptide
  VARIANT (1)..(17): Xaa = Any Amino Acid
CCEXXXYACNPACTXGA

SEQ ID NO: 10977 - protein, 17 aa, Artificial Sequence
  Synthetically generated peptide
  VARIANT (1)..(17): Xaa = Any Amino Acid
CCEXXXYACNPACTGXA

SEQ ID NO: 10978 - protein, 16 aa, Artificial Sequence
  Synthetically generated peptide
  VARIANT (1)..(16): Xaa = Any Amino Acid
CCEXXYXACNPACTGA

SEQ ID NO: 10979 - protein, 17 aa, Artificial Sequence
  Synthetically generated peptide
  VARIANT (1)..(17): Xaa = Any Amino Acid
CCEXXYXXACNPACTGA

SEQ ID NO: 10980 - protein, 17 aa, Artificial Sequence
  Synthetically generated peptide
  VARIANT (1)..(17): Xaa = Any Amino Acid
CCEXXYXACXNPACTGA

SEQ ID NO: 10981 - protein, 17 aa, Artificial Sequence
  Synthetically generated peptide
  VARIANT (1)..(17): Xaa = Any Amino Acid
CCEXXYXACNXPACTGA

SEQ ID NO: 10982 - protein, 17 aa, Artificial Sequence
  Synthetically generated peptide
  VARIANT (1)..(17): Xaa = Any Amino Acid
CCEXXYXACNPXACTGA

SEQ ID NO: 10983 - protein, 17 aa, Artificial Sequence
  Synthetically generated peptide
  VARIANT (1)..(17): Xaa = Any Amino Acid
CCEXXYXACNPAXCTGA

SEQ ID NO: 10984 - protein, 17 aa, Artificial Sequence
  Synthetically generated peptide
  VARIANT (1)..(17): Xaa = Any Amino Acid
CCEXXYXACNPACXTGA

SEQ ID NO: 10985 - protein, 17 aa, Artificial Sequence
  Synthetically generated peptide
  VARIANT (1)..(17): Xaa = Any Amino Acid
CCEXXYXACNPACTXGA

SEQ ID NO: 10986 - protein, 17 aa, Artificial Sequence
  Synthetically generated peptide
  VARIANT (1)..(17): Xaa = Any Amino Acid
CCEXXYXACNPACTGXA

SEQ ID NO: 10987 - protein, 16 aa, Artificial Sequence
  Synthetically generated peptide
  VARIANT (1)..(16): Xaa = Any Amino Acid
CCEXXYACXNPACTGA

SEQ ID NO: 10988 - protein, 17 aa, Artificial Sequence
  Synthetically generated peptide
  VARIANT (1)..(17): Xaa = Any Amino Acid
CCEXXYACXXNPACTGA

SEQ ID NO: 10989 - protein, 17 aa, Artificial Sequence
  Synthetically generated peptide
  VARIANT (1)..(17): Xaa = Any Amino Acid
CCEXXYACXNXPACTGA

SEQ ID NO: 10990 - protein, 17 aa, Artificial Sequence
  Synthetically generated peptide
  VARIANT (1)..(17): Xaa = Any Amino Acid
CCEXXYACXNPXACTGA

SEQ ID NO: 10991 - protein, 17 aa, Artificial Sequence
  Synthetically generated peptide
  VARIANT (1)..(17): Xaa = Any Amino Acid
CCEXXYACXNPAXCTGA

SEQ ID NO: 10992 - protein, 17 aa, Artificial Sequence
  Synthetically generated peptide
  VARIANT (1)..(17): Xaa = Any Amino Acid
CCEXXYACXNPACXTGA

SEQ ID NO: 10993 - protein, 17 aa, Artificial Sequence
  Synthetically generated peptide
  VARIANT (1)..(17): Xaa = Any Amino Acid
CCEXXYACXNPACTXGA

SEQ ID NO: 10994 - protein, 17 aa, Artificial Sequence
  Synthetically generated peptide
  VARIANT (1)..(17): Xaa = Any Amino Acid
CCEXXYACXNPACTGXA

SEQ ID NO: 10995 - protein, 16 aa, Artificial Sequence
  Synthetically generated peptide
  VARIANT (1)..(16): Xaa = Any Amino Acid
CCEXXYACNXPACTGA

SEQ ID NO: 10996 - protein, 17 aa, Artificial Sequence
  Synthetically generated peptide
  VARIANT (1)..(17): Xaa = Any Amino Acid
CCEXXYACNXXPACTGA

SEQ ID NO: 10997 - protein, 17 aa, Artificial Sequence
  Synthetically generated peptide
  VARIANT (1)..(17): Xaa = Any Amino Acid
CCEXXYACNXPXACTGA

SEQ ID NO: 10998 - protein, 17 aa, Artificial Sequence
  Synthetically generated peptide
  VARIANT (1)..(17): Xaa = Any Amino Acid
CCEXXYACNXPAXCTGA

SEQ ID NO: 10999 - protein, 17 aa, Artificial Sequence
  Synthetically generated peptide
  VARIANT (1)..(17): Xaa = Any Amino Acid
CCEXXYACNXPACXTGA

SEQ ID NO: 11000 - protein, 17 aa, Artificial Sequence
  Synthetically generated peptide
  VARIANT (1)..(17): Xaa = Any Amino Acid
CCEXXYACNXPACTXGA

SEQ ID NO: 11001 - protein, 17 aa, Artificial Sequence
  Synthetically generated peptide
  VARIANT (1)..(17): Xaa = Any Amino Acid
CCEXXYACNXPACTGXA

SEQ ID NO: 11002 - protein, 16 aa, Artificial Sequence
  Synthetically generated peptide
  VARIANT (1)..(16): Xaa = Any Amino Acid
CCEXXYACNPXACTGA

SEQ ID NO: 11003 - protein, 17 aa, Artificial Sequence
  Synthetically generated peptide
  VARIANT (1)..(17): Xaa = Any Amino Acid
CCEXXYACNPXXACTGA

SEQ ID NO: 11004 - protein, 17 aa, Artificial Sequence
  Synthetically generated peptide
  VARIANT (1)..(17): Xaa = Any Amino Acid
CCEXXYACNPXAXCTGA

SEQ ID NO: 11005 - protein, 17 aa, Artificial Sequence
  Synthetically generated peptide
  VARIANT (1)..(17): Xaa = Any Amino Acid
CCEXXYACNPXACXTGA

SEQ ID NO: 11006 - protein, 17 aa, Artificial Sequence
  Synthetically generated peptide
  VARIANT (1)..(17): Xaa = Any Amino Acid
CCEXXYACNPXACTXGA

SEQ ID NO: 11007 - protein, 17 aa, Artificial Sequence
  Synthetically generated peptide
  VARIANT (1)..(17): Xaa = Any Amino Acid
CCEXXYACNPXACTGXA

SEQ ID NO: 11008 - protein, 16 aa, Artificial Sequence
  Synthetically generated peptide
  VARIANT (1)..(16): Xaa = Any Amino Acid
CCEXXYACNPAXCTGA

SEQ ID NO: 11009 - protein, 17 aa, Artificial Sequence
  Synthetically generated peptide
  VARIANT (1)..(17): Xaa = Any Amino Acid
CCEXXYACNPAXXCTGA

SEQ ID NO: 11010 - protein, 17 aa, Artificial Sequence
  Synthetically generated peptide
  VARIANT (1)..(17): Xaa = Any Amino Acid
CCEXXYACNPAXCXTGA

SEQ ID NO: 11011 - protein, 17 aa, Artificial Sequence
  Synthetically generated peptide
  VARIANT (1)..(17): Xaa = Any Amino Acid
CCEXXYACNPAXCTXGA

SEQ ID NO: 11012 - protein, 17 aa, Artificial Sequence
  Synthetically generated peptide
  VARIANT (1)..(17): Xaa = Any Amino Acid
CCEXXYACNPAXCTGXA

SEQ ID NO: 11013 - protein, 16 aa, Artificial Sequence
  Synthetically generated peptide
  VARIANT (1)..(16): Xaa = Any Amino Acid
CCEXXYACNPACXTGA

SEQ ID NO: 11014 - protein, 17 aa, Artificial Sequence
  Synthetically generated peptide
  VARIANT (1)..(17): Xaa = Any Amino Acid
CCEXXYACNPACXXTGA

SEQ ID NO: 11015 - protein, 17 aa, Artificial Sequence
  Synthetically generated peptide
  VARIANT (1)..(17): Xaa = Any Amino Acid
CCEXXYACNPACXTXGA

SEQ ID NO: 11016 - protein, 17 aa, Artificial Sequence
  Synthetically generated peptide
  VARIANT (1)..(17): Xaa = Any Amino Acid
CCEXXYACNPACXTGXA

SEQ ID NO: 11017 - protein, 16 aa, Artificial Sequence
  Synthetically generated peptide
  VARIANT (1)..(16): Xaa = Any Amino Acid
CCEXXYACNPACTXGA

SEQ ID NO: 11018 - protein, 17 aa, Artificial Sequence
  Synthetically generated peptide
  VARIANT (1)..(17): Xaa = Any Amino Acid
CCEXXYACNPACTXXGA

SEQ ID NO: 11019 - protein, 17 aa, Artificial Sequence
  Synthetically generated peptide
  VARIANT (1)..(17): Xaa = Any Amino Acid
CCEXXYACNPACTXGXA

SEQ ID NO: 11020 - protein, 16 aa, Artificial Sequence
  Synthetically generated peptide
  VARIANT (1)..(16): Xaa = Any Amino Acid
CCEXXYACNPACTGXA

SEQ ID NO: 11021 - protein, 17 aa, Artificial Sequence
  Synthetically generated peptide
  VARIANT (1)..(17): Xaa = Any Amino Acid
CCEXXYACNPACTGXXA

SEQ ID NO: 11022 - protein, 15 aa, Artificial Sequence
  Synthetically generated peptide
  VARIANT (1)..(15): Xaa = Any Amino Acid
CCEXYXACNPACTGA

SEQ ID NO: 11023 - protein, 16 aa, Artificial Sequence
  Synthetically generated peptide
  VARIANT (1)..(16): Xaa = Any Amino Acid
CCEXYXXACNPACTGA

SEQ ID NO: 11024 - protein, 17 aa, Artificial Sequence
  Synthetically generated peptide
  VARIANT (1)..(17): Xaa = Any Amino Acid
CCEXYXXXACNPACTGA

SEQ ID NO: 11025 - protein, 17 aa, Artificial Sequence
  Synthetically generated peptide
  VARIANT (1)..(17): Xaa = Any Amino Acid
CCEXYXXACXNPACTGA

SEQ ID NO: 11026 - protein, 17 aa, Artificial Sequence
  Synthetically generated peptide
  VARIANT (1)..(17): Xaa = Any Amino Acid
CCEXYXXACNXPACTGA

SEQ ID NO: 11027 - protein, 17 aa, Artificial Sequence
  Synthetically generated peptide
  VARIANT (1)..(17): Xaa = Any Amino Acid
CCEXYXXACNPXACTGA

SEQ ID NO: 11028 - protein, 17 aa, Artificial Sequence
  Synthetically generated peptide
  VARIANT (1)..(17): Xaa = Any Amino Acid
CCEXYXXACNPAXCTGA

SEQ ID NO: 11029 - protein, 17 aa, Artificial Sequence
  Synthetically generated peptide
  VARIANT (1)..(17): Xaa = Any Amino Acid
CCEXYXXACNPACXTGA

SEQ ID NO: 11030 - protein, 17 aa, Artificial Sequence
  Synthetically generated peptide
  VARIANT (1)..(17): Xaa = Any Amino Acid
CCEXYXXACNPACTXGA

SEQ ID NO: 11031 - protein, 17 aa, Artificial Sequence
  Synthetically generated peptide
  VARIANT (1)..(17): Xaa = Any Amino Acid
CCEXYXXACNPACTGXA

SEQ ID NO: 11032 - protein, 16 aa, Artificial Sequence
  Synthetically generated peptide
  VARIANT (1)..(16): Xaa = Any Amino Acid
CCEXYXACXNPACTGA

SEQ ID NO: 11033 - protein, 17 aa, Artificial Sequence
  Synthetically generated peptide
  VARIANT (1)..(17): Xaa = Any Amino Acid
CCEXYXACXXNPACTGA

SEQ ID NO: 11034 - protein, 17 aa, Artificial Sequence
  Synthetically generated peptide
  VARIANT (1)..(17): Xaa = Any Amino Acid
CCEXYXACXNXPACTGA

SEQ ID NO: 11035 - protein, 17 aa, Artificial Sequence
  Synthetically generated peptide
  VARIANT (1)..(17): Xaa = Any Amino Acid
CCEXYXACXNPXACTGA

SEQ ID NO: 11036 - protein, 17 aa, Artificial Sequence
  Synthetically generated peptide
  VARIANT (1)..(17): Xaa = Any Amino Acid
CCEXYXACXNPAXCTGA

SEQ ID NO: 11037 - protein, 17 aa, Artificial Sequence
  Synthetically generated peptide
  VARIANT (1)..(17): Xaa = Any Amino Acid
CCEXYXACXNPACXTGA

SEQ ID NO: 11038 - protein, 17 aa, Artificial Sequence
  Synthetically generated peptide
  VARIANT (1)..(17): Xaa = Any Amino Acid
CCEXYXACXNPACTXGA

SEQ ID NO: 11039 - protein, 17 aa, Artificial Sequence
  Synthetically generated peptide
  VARIANT (1)..(17): Xaa = Any Amino Acid
CCEXYXACXNPACTGXA

SEQ ID NO: 11040 - protein, 16 aa, Artificial Sequence
  Synthetically generated peptide
  VARIANT (1)..(16): Xaa = Any Amino Acid
CCEXYXACNXPACTGA

SEQ ID NO: 11041 - protein, 17 aa, Artificial Sequence
  Synthetically generated peptide
  VARIANT (1)..(17): Xaa = Any Amino Acid
CCEXYXACNXXPACTGA

SEQ ID NO: 11042 - protein, 17 aa, Artificial Sequence
  Synthetically generated peptide
  VARIANT (1)..(17): Xaa = Any Amino Acid
CCEXYXACNXPXACTGA

SEQ ID NO: 11043 - protein, 17 aa, Artificial Sequence
  Synthetically generated peptide
  VARIANT (1)..(17): Xaa = Any Amino Acid
CCEXYXACNXPAXCTGA

SEQ ID NO: 11044 - protein, 17 aa, Artificial Sequence
  Synthetically generated peptide
  VARIANT (1)..(17): Xaa = Any Amino Acid
CCEXYXACNXPACXTGA

SEQ ID NO: 11045 - protein, 17 aa, Artificial Sequence
  Synthetically generated peptide
  VARIANT (1)..(17): Xaa = Any Amino Acid
CCEXYXACNXPACTXGA

SEQ ID NO: 11046 - protein, 17 aa, Artificial Sequence
  Synthetically generated peptide
  VARIANT (1)..(17): Xaa = Any Amino Acid
CCEXYXACNXPACTGXA

SEQ ID NO: 11047 - protein, 16 aa, Artificial Sequence
  Synthetically generated peptide
  VARIANT (1)..(16): Xaa = Any Amino Acid
CCEXYXACNPXACTGA

SEQ ID NO: 11048 - protein, 17 aa, Artificial Sequence
  Synthetically generated peptide
  VARIANT (1)..(17): Xaa = Any Amino Acid
CCEXYXACNPXXACTGA

SEQ ID NO: 11049 - protein, 17 aa, Artificial Sequence
  Synthetically generated peptide
  VARIANT (1)..(17): Xaa = Any Amino Acid
CCEXYXACNPXAXCTGA

SEQ ID NO: 11050 - protein, 17 aa, Artificial Sequence
  Synthetically generated peptide
  VARIANT (1)..(17): Xaa = Any Amino Acid
CCEXYXACNPXACXTGA

SEQ ID NO: 11051 - protein, 17 aa, Artificial Sequence
  Synthetically generated peptide
  VARIANT (1)..(17): Xaa = Any Amino Acid
CCEXYXACNPXACTXGA

SEQ ID NO: 11052 - protein, 17 aa, Artificial Sequence
  Synthetically generated peptide
  VARIANT (1)..(17): Xaa = Any Amino Acid
CCEXYXACNPXACTGXA

SEQ ID NO: 11053 - protein, 16 aa, Artificial Sequence
  Synthetically generated peptide
  VARIANT (1)..(16): Xaa = Any Amino Acid
CCEXYXACNPAXCTGA

SEQ ID NO: 11054 - protein, 17 aa, Artificial Sequence
  Synthetically generated peptide
  VARIANT (1)..(17): Xaa = Any Amino Acid
CCEXYXACNPAXXCTGA

SEQ ID NO: 11055 - protein, 17 aa, Artificial Sequence
  Synthetically generated peptide
  VARIANT (1)..(17): Xaa = Any Amino Acid
CCEXYXACNPAXCXTGA

SEQ ID NO: 11056 - protein, 17 aa, Artificial Sequence
  Synthetically generated peptide
  VARIANT (1)..(17): Xaa = Any Amino Acid
CCEXYXACNPAXCTXGA

SEQ ID NO: 11057 - protein, 17 aa, Artificial Sequence
  Synthetically generated peptide
  VARIANT (1)..(17): Xaa = Any Amino Acid
CCEXYXACNPAXCTGXA

SEQ ID NO: 11058 - protein, 16 aa, Artificial Sequence
  Synthetically generated peptide
  VARIANT (1)..(16): Xaa = Any Amino Acid
CCEXYXACNPACXTGA

SEQ ID NO: 11059 - protein, 17 aa, Artificial Sequence
  Synthetically generated peptide
  VARIANT (1)..(17): Xaa = Any Amino Acid
CCEXYXACNPACXXTGA

SEQ ID NO: 11060 - protein, 17 aa, Artificial Sequence
  Synthetically generated peptide
  VARIANT (1)..(17): Xaa = Any Amino Acid
CCEXYXACNPACXTXGA

SEQ ID NO: 11061 - protein, 17 aa, Artificial Sequence
  Synthetically generated peptide
  VARIANT (1)..(17): Xaa = Any Amino Acid
CCEXYXACNPACXTGXA

SEQ ID NO: 11062 - protein, 16 aa, Artificial Sequence
  Synthetically generated peptide
  VARIANT (1)..(16): Xaa = Any Amino Acid
CCEXYXACNPACTXGA

SEQ ID NO: 11063 - protein, 17 aa, Artificial Sequence
  Synthetically generated peptide
  VARIANT (1)..(17): Xaa = Any Amino Acid
CCEXYXACNPACTXXGA

SEQ ID NO: 11064 - protein, 17 aa, Artificial Sequence
  Synthetically generated peptide
  VARIANT (1)..(17): Xaa = Any Amino Acid
CCEXYXACNPACTXGXA

SEQ ID NO: 11065 - protein, 16 aa, Artificial Sequence
  Synthetically generated peptide
  VARIANT (1)..(16): Xaa = Any Amino Acid
CCEXYXACNPACTGXA

SEQ ID NO: 11066 - protein, 17 aa, Artificial Sequence
  Synthetically generated peptide
  VARIANT (1)..(17): Xaa = Any Amino Acid
CCEXYXACNPACTGXXA

SEQ ID NO: 11067 - protein, 15 aa, Artificial Sequence
  Synthetically generated peptide
  VARIANT (1)..(15): Xaa = Any Amino Acid
CCEXYACXNPACTGA

SEQ ID NO: 11068 - protein, 16 aa, Artificial Sequence
  Synthetically generated peptide
  VARIANT (1)..(16): Xaa = Any Amino Acid
CCEXYACXXNPACTGA

SEQ ID NO: 11069 - protein, 17 aa, Artificial Sequence
  Synthetically generated peptide
  VARIANT (1)..(17): Xaa = Any Amino Acid
CCEXYACXXXNPACTGA

SEQ ID NO: 11070 - protein, 17 aa, Artificial Sequence
  Synthetically generated peptide
  VARIANT (1)..(17): Xaa = Any Amino Acid
CCEXYACXXNXPACTGA

SEQ ID NO: 11071 - protein, 17 aa, Artificial Sequence
  Synthetically generated peptide
  VARIANT (1)..(17): Xaa = Any Amino Acid
CCEXYACXXNPXACTGA

SEQ ID NO: 11072 - protein, 17 aa, Artificial Sequence
  Synthetically generated peptide
  VARIANT (1)..(17): Xaa = Any Amino Acid
CCEXYACXXNPAXCTGA

SEQ ID NO: 11073 - protein, 17 aa, Artificial Sequence
  Synthetically generated peptide
  VARIANT (1)..(17): Xaa = Any Amino Acid
CCEXYACXXNPACXTGA

SEQ ID NO: 11074 - protein, 17 aa, Artificial Sequence
  Synthetically generated peptide
  VARIANT (1)..(17): Xaa = Any Amino Acid
CCEXYACXXNPACTXGA

SEQ ID NO: 11075 - protein, 17 aa, Artificial Sequence
  Synthetically generated peptide
  VARIANT (1)..(17): Xaa = Any Amino Acid
CCEXYACXXNPACTGXA

SEQ ID NO: 11076 - protein, 16 aa, Artificial Sequence
  Synthetically generated peptide
  VARIANT (1)..(16): Xaa = Any Amino Acid
CCEXYACXNXPACTGA

SEQ ID NO: 11077 - protein, 17 aa, Artificial Sequence
  Synthetically generated peptide
  VARIANT (1)..(17): Xaa = Any Amino Acid
CCEXYACXNXXPACTGA

SEQ ID NO: 11078 - protein, 17 aa, Artificial Sequence
  Synthetically generated peptide
  VARIANT (1)..(17): Xaa = Any Amino Acid
CCEXYACXNXPXACTGA

SEQ ID NO: 11079 - protein, 17 aa, Artificial Sequence
  Synthetically generated peptide
  VARIANT (1)..(17): Xaa = Any Amino Acid
CCEXYACXNXPAXCTGA

SEQ ID NO: 11080 - protein, 17 aa, Artificial Sequence
  Synthetically generated peptide
  VARIANT (1)..(17): Xaa = Any Amino Acid
CCEXYACXNXPACXTGA

SEQ ID NO: 11081 - protein, 17 aa, Artificial Sequence
  Synthetically generated peptide
  VARIANT (1)..(17): Xaa = Any Amino Acid
CCEXYACXNXPACTXGA

SEQ ID NO: 11082 - protein, 17 aa, Artificial Sequence
  Synthetically generated peptide
  VARIANT (1)..(17): Xaa = Any Amino Acid
CCEXYACXNXPACTGXA

SEQ ID NO: 11083 - protein, 16 aa, Artificial Sequence
  Synthetically generated peptide
  VARIANT (1)..(16): Xaa = Any Amino Acid
CCEXYACXNPXACTGA

SEQ ID NO: 11084 - protein, 17 aa, Artificial Sequence
  Synthetically generated peptide
  VARIANT (1)..(17): Xaa = Any Amino Acid
CCEXYACXNPXXACTGA

SEQ ID NO: 11085 - protein, 17 aa, Artificial Sequence
  Synthetically generated peptide
  VARIANT (1)..(17): Xaa = Any Amino Acid
CCEXYACXNPXAXCTGA

SEQ ID NO: 11086 - protein, 17 aa, Artificial Sequence
  Synthetically generated peptide
  VARIANT (1)..(17): Xaa = Any Amino Acid
CCEXYACXNPXACXTGA

SEQ ID NO: 11087 - protein, 17 aa, Artificial Sequence
  Synthetically generated peptide
  VARIANT (1)..(17): Xaa = Any Amino Acid
CCEXYACXNPXACTXGA

SEQ ID NO: 11088 - protein, 17 aa, Artificial Sequence
  Synthetically generated peptide
  VARIANT (1)..(17): Xaa = Any Amino Acid
CCEXYACXNPXACTGXA

SEQ ID NO: 11089 - protein, 16 aa, Artificial Sequence
  Synthetically generated peptide
  VARIANT (1)..(16): Xaa = Any Amino Acid
CCEXYACXNPAXCTGA

SEQ ID NO: 11090 - protein, 17 aa, Artificial Sequence
  Synthetically generated peptide
  VARIANT (1)..(17): Xaa = Any Amino Acid
CCEXYACXNPAXXCTGA

SEQ ID NO: 11091 - protein, 17 aa, Artificial Sequence
  Synthetically generated peptide
  VARIANT (1)..(17): Xaa = Any Amino Acid
CCEXYACXNPAXCXTGA

SEQ ID NO: 11092 - protein, 17 aa, Artificial Sequence
  Synthetically generated peptide
  VARIANT (1)..(17): Xaa = Any Amino Acid
CCEXYACXNPAXCTXGA

SEQ ID NO: 11093 - protein, 17 aa, Artificial Sequence
  Synthetically generated peptide
  VARIANT (1)..(17): Xaa = Any Amino Acid
CCEXYACXNPAXCTGXA

SEQ ID NO: 11094 - protein, 16 aa, Artificial Sequence
  Synthetically generated peptide
  VARIANT (1)..(16): Xaa = Any Amino Acid
CCEXYACXNPACXTGA

SEQ ID NO: 11095 - protein, 17 aa, Artificial Sequence
  Synthetically generated peptide
  VARIANT (1)..(17): Xaa = Any Amino Acid
CCEXYACXNPACXXTGA

SEQ ID NO: 11096 - protein, 17 aa, Artificial Sequence
  Synthetically generated peptide
  VARIANT (1)..(17): Xaa = Any Amino Acid
CCEXYACXNPACXTXGA

SEQ ID NO: 11097 - protein, 17 aa, Artificial Sequence
  Synthetically generated peptide
  VARIANT (1)..(17): Xaa = Any Amino Acid
CCEXYACXNPACXTGXA

SEQ ID NO: 11098 - protein, 16 aa, Artificial Sequence
  Synthetically generated peptide
  VARIANT (1)..(16): Xaa = Any Amino Acid
CCEXYACXNPACTXGA

SEQ ID NO: 11099 - protein, 17 aa, Artificial Sequence
  Synthetically generated peptide
  VARIANT (1)..(17): Xaa = Any Amino Acid
CCEXYACXNPACTXXGA

SEQ ID NO: 11100 - protein, 17 aa, Artificial Sequence
  Synthetically generated peptide
  VARIANT (1)..(17): Xaa = Any Amino Acid
CCEXYACXNPACTXGXA

SEQ ID NO: 11101 - protein, 16 aa, Artificial Sequence
  Synthetically generated peptide
  VARIANT (1)..(16): Xaa = Any Amino Acid
CCEXYACXNPACTGXA

SEQ ID NO: 11102 - protein, 17 aa, Artificial Sequence
  Synthetically generated peptide
  VARIANT (1)..(17): Xaa = Any Amino Acid
CCEXYACXNPACTGXXA

SEQ ID NO: 11103 - protein, 15 aa, Artificial Sequence
  Synthetically generated peptide
  VARIANT (1)..(15): Xaa = Any Amino Acid
CCEXYACNXPACTGA

SEQ ID NO: 11104 - protein, 16 aa, Artificial Sequence
  Synthetically generated peptide
  VARIANT (1)..(16): Xaa = Any Amino Acid
CCEXYACNXXPACTGA

SEQ ID NO: 11105 - protein, 17 aa, Artificial Sequence
  Synthetically generated peptide
  VARIANT (1)..(17): Xaa = Any Amino Acid
CCEXYACNXXXPACTGA

SEQ ID NO: 11106 - protein, 17 aa, Artificial Sequence
  Synthetically generated peptide
  VARIANT (1)..(17): Xaa = Any Amino Acid
CCEXYACNXXPXACTGA

SEQ ID NO: 11107 - protein, 17 aa, Artificial Sequence
  Synthetically generated peptide
  VARIANT (1)..(17): Xaa = Any Amino Acid
CCEXYACNXXPAXCTGA

SEQ ID NO: 11108 - protein, 17 aa, Artificial Sequence
  Synthetically generated peptide
  VARIANT (1)..(17): Xaa = Any Amino Acid
CCEXYACNXXPACXTGA

SEQ ID NO: 11109 - protein, 17 aa, Artificial Sequence
  Synthetically generated peptide
  VARIANT (1)..(17): Xaa = Any Amino Acid
CCEXYACNXXPACTXGA

SEQ ID NO: 11110 - protein, 17 aa, Artificial Sequence
  Synthetically generated peptide
  VARIANT (1)..(17): Xaa = Any Amino Acid
CCEXYACNXXPACTGXA

SEQ ID NO: 11111 - protein, 16 aa, Artificial Sequence
  Synthetically generated peptide
  VARIANT (1)..(16): Xaa = Any Amino Acid
CCEXYACNXPXACTGA

SEQ ID NO: 11112 - protein, 17 aa, Artificial Sequence
  Synthetically generated peptide
  VARIANT (1)..(17): Xaa = Any Amino Acid
CCEXYACNXPXXACTGA

SEQ ID NO: 11113 - protein, 17 aa, Artificial Sequence
  Synthetically generated peptide
  VARIANT (1)..(17): Xaa = Any Amino Acid
CCEXYACNXPXAXCTGA

SEQ ID NO: 11114 - protein, 17 aa, Artificial Sequence
  Synthetically generated peptide
  VARIANT (1)..(17): Xaa = Any Amino Acid
CCEXYACNXPXACXTGA

SEQ ID NO: 11115 - protein, 17 aa, Artificial Sequence
  Synthetically generated peptide
  VARIANT (1)..(17): Xaa = Any Amino Acid
CCEXYACNXPXACTXGA

SEQ ID NO: 11116 - protein, 17 aa, Artificial Sequence
  Synthetically generated peptide
  VARIANT (1)..(17): Xaa = Any Amino Acid
CCEXYACNXPXACTGXA

SEQ ID NO: 11117 - protein, 16 aa, Artificial Sequence
  Synthetically generated peptide
  VARIANT (1)..(16): Xaa = Any Amino Acid
CCEXYACNXPAXCTGA

SEQ ID NO: 11118 - protein, 17 aa, Artificial Sequence
  Synthetically generated peptide
  VARIANT (1)..(17): Xaa = Any Amino Acid
CCEXYACNXPAXXCTGA

SEQ ID NO: 11119 - protein, 17 aa, Artificial Sequence
  Synthetically generated peptide
  VARIANT (1)..(17): Xaa = Any Amino Acid
CCEXYACNXPAXCXTGA

SEQ ID NO: 11120 - protein, 17 aa, Artificial Sequence
  Synthetically generated peptide
  VARIANT (1)..(17): Xaa = Any Amino Acid
CCEXYACNXPAXCTXGA

SEQ ID NO: 11121 - protein, 17 aa, Artificial Sequence
  Synthetically generated peptide
  VARIANT (1)..(17): Xaa = Any Amino Acid
CCEXYACNXPAXCTGXA

SEQ ID NO: 11122 - protein, 16 aa, Artificial Sequence
  Synthetically generated peptide
  VARIANT (1)..(16): Xaa = Any Amino Acid
CCEXYACNXPACXTGA

SEQ ID NO: 11123 - protein, 17 aa, Artificial Sequence
  Synthetically generated peptide
  VARIANT (1)..(17): Xaa = Any Amino Acid
CCEXYACNXPACXXTGA

SEQ ID NO: 11124 - protein, 17 aa, Artificial Sequence
  Synthetically generated peptide
  VARIANT (1)..(17): Xaa = Any Amino Acid
CCEXYACNXPACXTXGA

SEQ ID NO: 11125 - protein, 17 aa, Artificial Sequence
  Synthetically generated peptide
  VARIANT (1)..(17): Xaa = Any Amino Acid
CCEXYACNXPACXTGXA

SEQ ID NO: 11126 - protein, 16 aa, Artificial Sequence
  Synthetically generated peptide
  VARIANT (1)..(16): Xaa = Any Amino Acid
CCEXYACNXPACTXGA

SEQ ID NO: 11127 - protein, 17 aa, Artificial Sequence
  Synthetically generated peptide
  VARIANT (1)..(17): Xaa = Any Amino Acid
CCEXYACNXPACTXXGA

SEQ ID NO: 11128 - protein, 17 aa, Artificial Sequence
  Synthetically generated peptide
  VARIANT (1)..(17): Xaa = Any Amino Acid
CCEXYACNXPACTXGXA

SEQ ID NO: 11129 - protein, 16 aa, Artificial Sequence
  Synthetically generated peptide
  VARIANT (1)..(16): Xaa = Any Amino Acid
CCEXYACNXPACTGXA

SEQ ID NO: 11130 - protein, 17 aa, Artificial Sequence
  Synthetically generated peptide
  VARIANT (1)..(17): Xaa = Any Amino Acid
CCEXYACNXPACTGXXA

SEQ ID NO: 11131 - protein, 15 aa, Artificial Sequence
  Synthetically generated peptide
  VARIANT (1)..(15): Xaa = Any Amino Acid
CCEXYACNPXACTGA

SEQ ID NO: 11132 - protein, 16 aa, Artificial Sequence
  Synthetically generated peptide
  VARIANT (1)..(16): Xaa = Any Amino Acid
CCEXYACNPXXACTGA

SEQ ID NO: 11133 - protein, 17 aa, Artificial Sequence
  Synthetically generated peptide
  VARIANT (1)..(17): Xaa = Any Amino Acid
CCEXYACNPXXXACTGA

SEQ ID NO: 11134 - protein, 17 aa, Artificial Sequence
  Synthetically generated peptide
  VARIANT (1)..(17): Xaa = Any Amino Acid
CCEXYACNPXXAXCTGA

SEQ ID NO: 11135 - protein, 17 aa, Artificial Sequence
  Synthetically generated peptide
  VARIANT (1)..(17): Xaa = Any Amino Acid
CCEXYACNPXXACXTGA

SEQ ID NO: 11136 - protein, 17 aa, Artificial Sequence
  Synthetically generated peptide
  VARIANT (1)..(17): Xaa = Any Amino Acid
CCEXYACNPXXACTXGA

SEQ ID NO: 11137 - protein, 17 aa, Artificial Sequence
  Synthetically generated peptide
  VARIANT (1)..(17): Xaa = Any Amino Acid
CCEXYACNPXXACTGXA

SEQ ID NO: 11138 - protein, 16 aa, Artificial Sequence
  Synthetically generated peptide
  VARIANT (1)..(16): Xaa = Any Amino Acid
CCEXYACNPXAXCTGA

SEQ ID NO: 11139 - protein, 17 aa, Artificial Sequence
  Synthetically generated peptide
  VARIANT (1)..(17): Xaa = Any Amino Acid
CCEXYACNPXAXXCTGA

SEQ ID NO: 11140 - protein, 17 aa, Artificial Sequence
  Synthetically generated peptide
  VARIANT (1)..(17): Xaa = Any Amino Acid
CCEXYACNPXAXCXTGA

SEQ ID NO: 11141 - protein, 17 aa, Artificial Sequence
  Synthetically generated peptide
  VARIANT (1)..(17): Xaa = Any Amino Acid
CCEXYACNPXAXCTXGA

SEQ ID NO: 11142 - protein, 17 aa, Artificial Sequence
  Synthetically generated peptide
  VARIANT (1)..(17): Xaa = Any Amino Acid
CCEXYACNPXAXCTGXA

SEQ ID NO: 11143 - protein, 16 aa, Artificial Sequence
  Synthetically generated peptide
  VARIANT (1)..(16): Xaa = Any Amino Acid
CCEXYACNPXACXTGA

SEQ ID NO: 11144 - protein, 17 aa, Artificial Sequence
  Synthetically generated peptide
  VARIANT (1)..(17): Xaa = Any Amino Acid
CCEXYACNPXACXXTGA

SEQ ID NO: 11145 - protein, 17 aa, Artificial Sequence
  Synthetically generated peptide
  VARIANT (1)..(17): Xaa = Any Amino Acid
CCEXYACNPXACXTXGA

SEQ ID NO: 11146 - protein, 17 aa, Artificial Sequence
  Synthetically generated peptide
  VARIANT (1)..(17): Xaa = Any Amino Acid
CCEXYACNPXACXTGXA

SEQ ID NO: 11147 - protein, 16 aa, Artificial Sequence
  Synthetically generated peptide
  VARIANT (1)..(16): Xaa = Any Amino Acid
CCEXYACNPXACTXGA

SEQ ID NO: 11148 - protein, 17 aa, Artificial Sequence
  Synthetically generated peptide
  VARIANT (1)..(17): Xaa = Any Amino Acid
CCEXYACNPXACTXXGA

SEQ ID NO: 11149 - protein, 17 aa, Artificial Sequence
  Synthetically generated peptide
  VARIANT (1)..(17): Xaa = Any Amino Acid
CCEXYACNPXACTXGXA

SEQ ID NO: 11150 - protein, 16 aa, Artificial Sequence
  Synthetically generated peptide
  VARIANT (1)..(16): Xaa = Any Amino Acid
CCEXYACNPXACTGXA

SEQ ID NO: 11151 - protein, 17 aa, Artificial Sequence
  Synthetically generated peptide
  VARIANT (1)..(17): Xaa = Any Amino Acid
CCEXYACNPXACTGXXA

SEQ ID NO: 11152 - protein, 15 aa, Artificial Sequence
  Synthetically generated peptide
  VARIANT (1)..(15): Xaa = Any Amino Acid
CCEXYACNPAXCTGA

SEQ ID NO: 11153 - protein, 16 aa, Artificial Sequence
  Synthetically generated peptide
  VARIANT (1)..(16): Xaa = Any Amino Acid
CCEXYACNPAXXCTGA

SEQ ID NO: 11154 - protein, 17 aa, Artificial Sequence
  Synthetically generated peptide
  VARIANT (1)..(17): Xaa = Any Amino Acid
CCEXYACNPAXXXCTGA

SEQ ID NO: 11155 - protein, 17 aa, Artificial Sequence
  Synthetically generated peptide
  VARIANT (1)..(17): Xaa = Any Amino Acid
CCEXYACNPAXXCXTGA

SEQ ID NO: 11156 - protein, 17 aa, Artificial Sequence
  Synthetically generated peptide
  VARIANT (1)..(17): Xaa = Any Amino Acid
CCEXYACNPAXXCTXGA

SEQ ID NO: 11157 - protein, 17 aa, Artificial Sequence
  Synthetically generated peptide
  VARIANT (1)..(17): Xaa = Any Amino Acid
CCEXYACNPAXXCTGXA

SEQ ID NO: 11158 - protein, 16 aa, Artificial Sequence
  Synthetically generated peptide
  VARIANT (1)..(16): Xaa = Any Amino Acid
CCEXYACNPAXCXTGA

SEQ ID NO: 11159 - protein, 17 aa, Artificial Sequence
  Synthetically generated peptide
  VARIANT (1)..(17): Xaa = Any Amino Acid
CCEXYACNPAXCXXTGA

SEQ ID NO: 11160 - protein, 17 aa, Artificial Sequence
  Synthetically generated peptide
  VARIANT (1)..(17): Xaa = Any Amino Acid
CCEXYACNPAXCXTXGA

SEQ ID NO: 11161 - protein, 17 aa, Artificial Sequence
  Synthetically generated peptide
  VARIANT (1)..(17): Xaa = Any Amino Acid
CCEXYACNPAXCXTGXA

SEQ ID NO: 11162 - protein, 16 aa, Artificial Sequence
  Synthetically generated peptide
  VARIANT (1)..(16): Xaa = Any Amino Acid
CCEXYACNPAXCTXGA

SEQ ID NO: 11163 - protein, 17 aa, Artificial Sequence
  Synthetically generated peptide
  VARIANT (1)..(17): Xaa = Any Amino Acid
CCEXYACNPAXCTXXGA

SEQ ID NO: 11164 - protein, 17 aa, Artificial Sequence
  Synthetically generated peptide
  VARIANT (1)..(17): Xaa = Any Amino Acid
CCEXYACNPAXCTXGXA

SEQ ID NO: 11165 - protein, 16 aa, Artificial Sequence
  Synthetically generated peptide
  VARIANT (1)..(16): Xaa = Any Amino Acid
CCEXYACNPAXCTGXA

SEQ ID NO: 11166 - protein, 17 aa, Artificial Sequence
  Synthetically generated peptide
  VARIANT (1)..(17): Xaa = Any Amino Acid
CCEXYACNPAXCTGXXA

SEQ ID NO: 11167 - protein, 15 aa, Artificial Sequence
  Synthetically generated peptide
  VARIANT (1)..(15): Xaa = Any Amino Acid
CCEXYACNPACXTGA

SEQ ID NO: 11168 - protein, 16 aa, Artificial Sequence
  Synthetically generated peptide
  VARIANT (1)..(16): Xaa = Any Amino Acid
CCEXYACNPACXXTGA

SEQ ID NO: 11169 - protein, 17 aa, Artificial Sequence
  Synthetically generated peptide
  VARIANT (1)..(17): Xaa = Any Amino Acid
CCEXYACNPACXXXTGA

SEQ ID NO: 11170 - protein, 17 aa, Artificial Sequence
  Synthetically generated peptide
  VARIANT (1)..(17): Xaa = Any Amino Acid
CCEXYACNPACXXTXGA

SEQ ID NO: 11171 - protein, 17 aa, Artificial Sequence
  Synthetically generated peptide
  VARIANT (1)..(17): Xaa = Any Amino Acid
CCEXYACNPACXXTGXA

SEQ ID NO: 11172 - protein, 16 aa, Artificial Sequence
  Synthetically generated peptide
  VARIANT (1)..(16): Xaa = Any Amino Acid
CCEXYACNPACXTXGA

SEQ ID NO: 11173 - protein, 17 aa, Artificial Sequence
  Synthetically generated peptide
  VARIANT (1)..(17): Xaa = Any Amino Acid
CCEXYACNPACXTXXGA

SEQ ID NO: 11174 - protein, 17 aa, Artificial Sequence
  Synthetically generated peptide
  VARIANT (1)..(17): Xaa = Any Amino Acid
CCEXYACNPACXTXGXA

SEQ ID NO: 11175 - protein, 16 aa, Artificial Sequence
  Synthetically generated peptide
  VARIANT (1)..(16): Xaa = Any Amino Acid
CCEXYACNPACXTGXA

SEQ ID NO: 11176 - protein, 17 aa, Artificial Sequence
  Synthetically generated peptide
  VARIANT (1)..(17): Xaa = Any Amino Acid
CCEXYACNPACXTGXXA

SEQ ID NO: 11177 - protein, 15 aa, Artificial Sequence
  Synthetically generated peptide
  VARIANT (1)..(15): Xaa = Any Amino Acid
CCEXYACNPACTXGA

SEQ ID NO: 11178 - protein, 16 aa, Artificial Sequence
  Synthetically generated peptide
  VARIANT (1)..(16): Xaa = Any Amino Acid
CCEXYACNPACTXXGA

SEQ ID NO: 11179 - protein, 17 aa, Artificial Sequence
  Synthetically generated peptide
  VARIANT (1)..(17): Xaa = Any Amino Acid
CCEXYACNPACTXXXGA

SEQ ID NO: 11180 - protein, 17 aa, Artificial Sequence
  Synthetically generated peptide
  VARIANT (1)..(17): Xaa = Any Amino Acid
CCEXYACNPACTXXGXA

SEQ ID NO: 11181 - protein, 16 aa, Artificial Sequence
  Synthetically generated peptide
  VARIANT (1)..(16): Xaa = Any Amino Acid
CCEXYACNPACTXGXA

SEQ ID NO: 11182 - protein, 17 aa, Artificial Sequence
  Synthetically generated peptide
  VARIANT (1)..(17): Xaa = Any Amino Acid
CCEXYACNPACTXGXXA

SEQ ID NO: 11183 - protein, 15 aa, Artificial Sequence
  Synthetically generated peptide
  VARIANT (1)..(15): Xaa = Any Amino Acid
CCEXYACNPACTGXA

SEQ ID NO: 11184 - protein, 16 aa, Artificial Sequence
  Synthetically generated peptide
  VARIANT (1)..(16): Xaa = Any Amino Acid
CCEXYACNPACTGXXA

SEQ ID NO: 11185 - protein, 17 aa, Artificial Sequence
  Synthetically generated peptide
  VARIANT (1)..(17): Xaa = Any Amino Acid
CCEXYACNPACTGXXXA

SEQ ID NO: 11186 - protein, 14 aa, Artificial Sequence
  Synthetically generated peptide
  VARIANT (1)..(14): Xaa = Any Amino Acid
CCEYXACNPACTGA

SEQ ID NO: 11187 - protein, 15 aa, Artificial Sequence
  Synthetically generated peptide
  VARIANT (1)..(15): Xaa = Any Amino Acid
CCEYXXACNPACTGA

SEQ ID NO: 11188 - protein, 16 aa, Artificial Sequence
  Synthetically generated peptide
  VARIANT (1)..(16): Xaa = Any Amino Acid
CCEYXXXACNPACTGA

SEQ ID NO: 11189 - protein, 17 aa, Artificial Sequence
  Synthetically generated peptide
  VARIANT (1)..(17): Xaa = Any Amino Acid
CCEYXXXXACNPACTGA

SEQ ID NO: 11190 - protein, 17 aa, Artificial Sequence
  Synthetically generated peptide
  VARIANT (1)..(17): Xaa = Any Amino Acid
CCEYXXXACXNPACTGA

SEQ ID NO: 11191 - protein, 17 aa, Artificial Sequence
  Synthetically generated peptide
  VARIANT (1)..(17): Xaa = Any Amino Acid
CCEYXXXACNXPACTGA

SEQ ID NO: 11192 - protein, 17 aa, Artificial Sequence
  Synthetically generated peptide
  VARIANT (1)..(17): Xaa = Any Amino Acid
CCEYXXXACNPXACTGA

SEQ ID NO: 11193 - protein, 17 aa, Artificial Sequence
  Synthetically generated peptide
  VARIANT (1)..(17): Xaa = Any Amino Acid
CCEYXXXACNPAXCTGA

SEQ ID NO: 11194 - protein, 17 aa, Artificial Sequence
  Synthetically generated peptide
  VARIANT (1)..(17): Xaa = Any Amino Acid
CCEYXXXACNPACXTGA

SEQ ID NO: 11195 - protein, 17 aa, Artificial Sequence
  Synthetically generated peptide
  VARIANT (1)..(17): Xaa = Any Amino Acid
CCEYXXXACNPACTXGA

SEQ ID NO: 11196 - protein, 17 aa, Artificial Sequence
  Synthetically generated peptide
  VARIANT (1)..(17): Xaa = Any Amino Acid
CCEYXXXACNPACTGXA

SEQ ID NO: 11197 - protein, 16 aa, Artificial Sequence
  Synthetically generated peptide
  VARIANT (1)..(16): Xaa = Any Amino Acid
CCEYXXACXNPACTGA

SEQ ID NO: 11198 - protein, 17 aa, Artificial Sequence
  Synthetically generated peptide
  VARIANT (1)..(17): Xaa = Any Amino Acid
CCEYXXACXXNPACTGA

SEQ ID NO: 11199 - protein, 17 aa, Artificial Sequence
  Synthetically generated peptide
  VARIANT (1)..(17): Xaa = Any Amino Acid
CCEYXXACXNXPACTGA

SEQ ID NO: 11200 - protein, 17 aa, Artificial Sequence
  Synthetically generated peptide
  VARIANT (1)..(17): Xaa = Any Amino Acid
CCEYXXACXNPXACTGA

SEQ ID NO: 11201 - protein, 17 aa, Artificial Sequence
  Synthetically generated peptide
  VARIANT (1)..(17): Xaa = Any Amino Acid
CCEYXXACXNPAXCTGA

SEQ ID NO: 11202 - protein, 17 aa, Artificial Sequence
  Synthetically generated peptide
  VARIANT (1)..(17): Xaa = Any Amino Acid
CCEYXXACXNPACXTGA

SEQ ID NO: 11203 - protein, 17 aa, Artificial Sequence
  Synthetically generated peptide
  VARIANT (1)..(17): Xaa = Any Amino Acid
CCEYXXACXNPACTXGA

SEQ ID NO: 11204 - protein, 17 aa, Artificial Sequence
  Synthetically generated peptide
  VARIANT (1)..(17): Xaa = Any Amino Acid
CCEYXXACXNPACTGXA

SEQ ID NO: 11205 - protein, 16 aa, Artificial Sequence
  Synthetically generated peptide
  VARIANT (1)..(16): Xaa = Any Amino Acid
CCEYXXACNXPACTGA

SEQ ID NO: 11206 - protein, 17 aa, Artificial Sequence
  Synthetically generated peptide
  VARIANT (1)..(17): Xaa = Any Amino Acid
CCEYXXACNXXPACTGA

SEQ ID NO: 11207 - protein, 17 aa, Artificial Sequence
  Synthetically generated peptide
  VARIANT (1)..(17): Xaa = Any Amino Acid
CCEYXXACNXPXACTGA

SEQ ID NO: 11208 - protein, 17 aa, Artificial Sequence
  Synthetically generated peptide
  VARIANT (1)..(17): Xaa = Any Amino Acid
CCEYXXACNXPAXCTGA

SEQ ID NO: 11209 - protein, 17 aa, Artificial Sequence
  Synthetically generated peptide
  VARIANT (1)..(17): Xaa = Any Amino Acid
CCEYXXACNXPACXTGA

SEQ ID NO: 11210 - protein, 17 aa, Artificial Sequence
  Synthetically generated peptide
  VARIANT (1)..(17): Xaa = Any Amino Acid
CCEYXXACNXPACTXGA

SEQ ID NO: 11211 - protein, 17 aa, Artificial Sequence
  Synthetically generated peptide
  VARIANT (1)..(17): Xaa = Any Amino Acid
CCEYXXACNXPACTGXA

SEQ ID NO: 11212 - protein, 16 aa, Artificial Sequence
  Synthetically generated peptide
  VARIANT (1)..(16): Xaa = Any Amino Acid
CCEYXXACNPXACTGA

SEQ ID NO: 11213 - protein, 17 aa, Artificial Sequence
  Synthetically generated peptide
  VARIANT (1)..(17): Xaa = Any Amino Acid
CCEYXXACNPXXACTGA

SEQ ID NO: 11214 - protein, 17 aa, Artificial Sequence
  Synthetically generated peptide
  VARIANT (1)..(17): Xaa = Any Amino Acid
CCEYXXACNPXAXCTGA

SEQ ID NO: 11215 - protein, 17 aa, Artificial Sequence
  Synthetically generated peptide
  VARIANT (1)..(17): Xaa = Any Amino Acid
CCEYXXACNPXACXTGA

SEQ ID NO: 11216 - protein, 17 aa, Artificial Sequence
  Synthetically generated peptide
  VARIANT (1)..(17): Xaa = Any Amino Acid
CCEYXXACNPXACTXGA

SEQ ID NO: 11217 - protein, 17 aa, Artificial Sequence
  Synthetically generated peptide
  VARIANT (1)..(17): Xaa = Any Amino Acid
CCEYXXACNPXACTGXA

SEQ ID NO: 11218 - protein, 16 aa, Artificial Sequence
  Synthetically generated peptide
  VARIANT (1)..(16): Xaa = Any Amino Acid
CCEYXXACNPAXCTGA

SEQ ID NO: 11219 - protein, 17 aa, Artificial Sequence
  Synthetically generated peptide
  VARIANT (1)..(17): Xaa = Any Amino Acid
CCEYXXACNPAXXCTGA

SEQ ID NO: 11220 - protein, 17 aa, Artificial Sequence
  Synthetically generated peptide
  VARIANT (1)..(17): Xaa = Any Amino Acid
CCEYXXACNPAXCXTGA

SEQ ID NO: 11221 - protein, 17 aa, Artificial Sequence
  Synthetically generated peptide
  VARIANT (1)..(17): Xaa = Any Amino Acid
CCEYXXACNPAXCTXGA

SEQ ID NO: 11222 - protein, 17 aa, Artificial Sequence
  Synthetically generated peptide
  VARIANT (1)..(17): Xaa = Any Amino Acid
CCEYXXACNPAXCTGXA

SEQ ID NO: 11223 - protein, 16 aa, Artificial Sequence
  Synthetically generated peptide
  VARIANT (1)..(16): Xaa = Any Amino Acid
CCEYXXACNPACXTGA

SEQ ID NO: 11224 - protein, 17 aa, Artificial Sequence
  Synthetically generated peptide
  VARIANT (1)..(17): Xaa = Any Amino Acid
CCEYXXACNPACXXTGA

SEQ ID NO: 11225 - protein, 17 aa, Artificial Sequence
  Synthetically generated peptide
  VARIANT (1)..(17): Xaa = Any Amino Acid
CCEYXXACNPACXTXGA

SEQ ID NO: 11226 - protein, 17 aa, Artificial Sequence
  Synthetically generated peptide
  VARIANT (1)..(17): Xaa = Any Amino Acid
CCEYXXACNPACXTGXA

SEQ ID NO: 11227 - protein, 16 aa, Artificial Sequence
  Synthetically generated peptide
  VARIANT (1)..(16): Xaa = Any Amino Acid
CCEYXXACNPACTXGA

SEQ ID NO: 11228 - protein, 17 aa, Artificial Sequence
  Synthetically generated peptide
  VARIANT (1)..(17): Xaa = Any Amino Acid
CCEYXXACNPACTXXGA

SEQ ID NO: 11229 - protein, 17 aa, Artificial Sequence
  Synthetically generated peptide
  VARIANT (1)..(17): Xaa = Any Amino Acid
CCEYXXACNPACTXGXA

SEQ ID NO: 11230 - protein, 16 aa, Artificial Sequence
  Synthetically generated peptide
  VARIANT (1)..(16): Xaa = Any Amino Acid
CCEYXXACNPACTGXA

SEQ ID NO: 11231 - protein, 17 aa, Artificial Sequence
  Synthetically generated peptide
  VARIANT (1)..(17): Xaa = Any Amino Acid
CCEYXXACNPACTGXXA

SEQ ID NO: 11232 - protein, 15 aa, Artificial Sequence
  Synthetically generated peptide
  VARIANT (1)..(15): Xaa = Any Amino Acid
CCEYXACXNPACTGA

SEQ ID NO: 11233 - protein, 16 aa, Artificial Sequence
  Synthetically generated peptide
  VARIANT (1)..(16): Xaa = Any Amino Acid
CCEYXACXXNPACTGA

SEQ ID NO: 11234 - protein, 17 aa, Artificial Sequence
  Synthetically generated peptide
  VARIANT (1)..(17): Xaa = Any Amino Acid
CCEYXACXXXNPACTGA

SEQ ID NO: 11235 - protein, 17 aa, Artificial Sequence
  Synthetically generated peptide
  VARIANT (1)..(17): Xaa = Any Amino Acid
CCEYXACXXNXPACTGA

SEQ ID NO: 11236 - protein, 17 aa, Artificial Sequence
  Synthetically generated peptide
  VARIANT (1)..(17): Xaa = Any Amino Acid
CCEYXACXXNPXACTGA

SEQ ID NO: 11237 - protein, 17 aa, Artificial Sequence
  Synthetically generated peptide
  VARIANT (1)..(17): Xaa = Any Amino Acid
CCEYXACXXNPAXCTGA

SEQ ID NO: 11238 - protein, 17 aa, Artificial Sequence
  Synthetically generated peptide
  VARIANT (1)..(17): Xaa = Any Amino Acid
CCEYXACXXNPACXTGA

SEQ ID NO: 11239 - protein, 17 aa, Artificial Sequence
  Synthetically generated peptide
  VARIANT (1)..(17): Xaa = Any Amino Acid
CCEYXACXXNPACTXGA

SEQ ID NO: 11240 - protein, 17 aa, Artificial Sequence
  Synthetically generated peptide
  VARIANT (1)..(17): Xaa = Any Amino Acid
CCEYXACXXNPACTGXA

SEQ ID NO: 11241 - protein, 16 aa, Artificial Sequence
  Synthetically generated peptide
  VARIANT (1)..(16): Xaa = Any Amino Acid
CCEYXACXNXPACTGA

SEQ ID NO: 11242 - protein, 17 aa, Artificial Sequence
  Synthetically generated peptide
  VARIANT (1)..(17): Xaa = Any Amino Acid
CCEYXACXNXXPACTGA

SEQ ID NO: 11243 - protein, 17 aa, Artificial Sequence
  Synthetically generated peptide
  VARIANT (1)..(17): Xaa = Any Amino Acid
CCEYXACXNXPXACTGA

SEQ ID NO: 11244 - protein, 17 aa, Artificial Sequence
  Synthetically generated peptide
  VARIANT (1)..(17): Xaa = Any Amino Acid
CCEYXACXNXPAXCTGA

SEQ ID NO: 11245 - protein, 17 aa, Artificial Sequence
  Synthetically generated peptide
  VARIANT (1)..(17): Xaa = Any Amino Acid
CCEYXACXNXPACXTGA

SEQ ID NO: 11246 - protein, 17 aa, Artificial Sequence
  Synthetically generated peptide
  VARIANT (1)..(17): Xaa = Any Amino Acid
CCEYXACXNXPACTXGA

SEQ ID NO: 11247 - protein, 17 aa, Artificial Sequence
  Synthetically generated peptide
  VARIANT (1)..(17): Xaa = Any Amino Acid
CCEYXACXNXPACTGXA

SEQ ID NO: 11248 - protein, 16 aa, Artificial Sequence
  Synthetically generated peptide
  VARIANT (1)..(16): Xaa = Any Amino Acid
CCEYXACXNPXACTGA

SEQ ID NO: 11249 - protein, 17 aa, Artificial Sequence
  Synthetically generated peptide
  VARIANT (1)..(17): Xaa = Any Amino Acid
CCEYXACXNPXXACTGA

SEQ ID NO: 11250 - protein, 17 aa, Artificial Sequence
  Synthetically generated peptide
  VARIANT (1)..(17): Xaa = Any Amino Acid
CCEYXACXNPXAXCTGA

SEQ ID NO: 11251 - protein, 17 aa, Artificial Sequence
  Synthetically generated peptide
  VARIANT (1)..(17): Xaa = Any Amino Acid
CCEYXACXNPXACXTGA

SEQ ID NO: 11252 - protein, 17 aa, Artificial Sequence
  Synthetically generated peptide
  VARIANT (1)..(17): Xaa = Any Amino Acid
CCEYXACXNPXACTXGA

SEQ ID NO: 11253 - protein, 17 aa, Artificial Sequence
  Synthetically generated peptide
  VARIANT (1)..(17): Xaa = Any Amino Acid
CCEYXACXNPXACTGXA

SEQ ID NO: 11254 - protein, 16 aa, Artificial Sequence
  Synthetically generated peptide
  VARIANT (1)..(16): Xaa = Any Amino Acid
CCEYXACXNPAXCTGA

SEQ ID NO: 11255 - protein, 17 aa, Artificial Sequence
  Synthetically generated peptide
  VARIANT (1)..(17): Xaa = Any Amino Acid
CCEYXACXNPAXXCTGA

SEQ ID NO: 11256 - protein, 17 aa, Artificial Sequence
  Synthetically generated peptide
  VARIANT (1)..(17): Xaa = Any Amino Acid
CCEYXACXNPAXCXTGA

SEQ ID NO: 11257 - protein, 17 aa, Artificial Sequence
  Synthetically generated peptide
  VARIANT (1)..(17): Xaa = Any Amino Acid
CCEYXACXNPAXCTXGA

SEQ ID NO: 11258 - protein, 17 aa, Artificial Sequence
  Synthetically generated peptide
  VARIANT (1)..(17): Xaa = Any Amino Acid
CCEYXACXNPAXCTGXA

SEQ ID NO: 11259 - protein, 16 aa, Artificial Sequence
  Synthetically generated peptide
  VARIANT (1)..(16): Xaa = Any Amino Acid
CCEYXACXNPACXTGA

SEQ ID NO: 11260 - protein, 17 aa, Artificial Sequence
  Synthetically generated peptide
  VARIANT (1)..(17): Xaa = Any Amino Acid
CCEYXACXNPACXXTGA

SEQ ID NO: 11261 - protein, 17 aa, Artificial Sequence
  Synthetically generated peptide
  VARIANT (1)..(17): Xaa = Any Amino Acid
CCEYXACXNPACXTXGA

SEQ ID NO: 11262 - protein, 17 aa, Artificial Sequence
  Synthetically generated peptide
  VARIANT (1)..(17): Xaa = Any Amino Acid
CCEYXACXNPACXTGXA

SEQ ID NO: 11263 - protein, 16 aa, Artificial Sequence
  Synthetically generated peptide
  VARIANT (1)..(16): Xaa = Any Amino Acid
CCEYXACXNPACTXGA

SEQ ID NO: 11264 - protein, 17 aa, Artificial Sequence
  Synthetically generated peptide
  VARIANT (1)..(17): Xaa = Any Amino Acid
CCEYXACXNPACTXXGA

SEQ ID NO: 11265 - protein, 17 aa, Artificial Sequence
  Synthetically generated peptide
  VARIANT (1)..(17): Xaa = Any Amino Acid
CCEYXACXNPACTXGXA

SEQ ID NO: 11266 - protein, 16 aa, Artificial Sequence
  Synthetically generated peptide
  VARIANT (1)..(16): Xaa = Any Amino Acid
CCEYXACXNPACTGXA

SEQ ID NO: 11267 - protein, 17 aa, Artificial Sequence
  Synthetically generated peptide
  VARIANT (1)..(17): Xaa = Any Amino Acid
CCEYXACXNPACTGXXA

SEQ ID NO: 11268 - protein, 15 aa, Artificial Sequence
  Synthetically generated peptide
  VARIANT (1)..(15): Xaa = Any Amino Acid
CCEYXACNXPACTGA

SEQ ID NO: 11269 - protein, 16 aa, Artificial Sequence
  Synthetically generated peptide
  VARIANT (1)..(16): Xaa = Any Amino Acid
CCEYXACNXXPACTGA

SEQ ID NO: 11270 - protein, 17 aa, Artificial Sequence
  Synthetically generated peptide
  VARIANT (1)..(17): Xaa = Any Amino Acid
CCEYXACNXXXPACTGA

SEQ ID NO: 11271 - protein, 17 aa, Artificial Sequence
  Synthetically generated peptide
  VARIANT (1)..(17): Xaa = Any Amino Acid
CCEYXACNXXPXACTGA

SEQ ID NO: 11272 - protein, 17 aa, Artificial Sequence
  Synthetically generated peptide
  VARIANT (1)..(17): Xaa = Any Amino Acid
CCEYXACNXXPAXCTGA

SEQ ID NO: 11273 - protein, 17 aa, Artificial Sequence
  Synthetically generated peptide
  VARIANT (1)..(17): Xaa = Any Amino Acid
CCEYXACNXXPACXTGA

SEQ ID NO: 11274 - protein, 17 aa, Artificial Sequence
  Synthetically generated peptide
  VARIANT (1)..(17): Xaa = Any Amino Acid
CCEYXACNXXPACTXGA

SEQ ID NO: 11275 - protein, 17 aa, Artificial Sequence
  Synthetically generated peptide
  VARIANT (1)..(17): Xaa = Any Amino Acid
CCEYXACNXXPACTGXA

SEQ ID NO: 11276 - protein, 16 aa, Artificial Sequence
  Synthetically generated peptide
  VARIANT (1)..(16): Xaa = Any Amino Acid
CCEYXACNXPXACTGA

SEQ ID NO: 11277 - protein, 17 aa, Artificial Sequence
  Synthetically generated peptide
  VARIANT (1)..(17): Xaa = Any Amino Acid
CCEYXACNXPXXACTGA

SEQ ID NO: 11278 - protein, 17 aa, Artificial Sequence
  Synthetically generated peptide
  VARIANT (1)..(17): Xaa = Any Amino Acid
CCEYXACNXPXAXCTGA

SEQ ID NO: 11279 - protein, 17 aa, Artificial Sequence
  Synthetically generated peptide
  VARIANT (1)..(17): Xaa = Any Amino Acid
CCEYXACNXPXACXTGA

SEQ ID NO: 11280 - protein, 17 aa, Artificial Sequence
  Synthetically generated peptide
  VARIANT (1)..(17): Xaa = Any Amino Acid
CCEYXACNXPXACTXGA

SEQ ID NO: 11281 - protein, 17 aa, Artificial Sequence
  Synthetically generated peptide
  VARIANT (1)..(17): Xaa = Any Amino Acid
CCEYXACNXPXACTGXA

SEQ ID NO: 11282 - protein, 16 aa, Artificial Sequence
  Synthetically generated peptide
  VARIANT (1)..(16): Xaa = Any Amino Acid
CCEYXACNXPAXCTGA

SEQ ID NO: 11283 - protein, 17 aa, Artificial Sequence
  Synthetically generated peptide
  VARIANT (1)..(17): Xaa = Any Amino Acid
CCEYXACNXPAXXCTGA

SEQ ID NO: 11284 - protein, 17 aa, Artificial Sequence
  Synthetically generated peptide
  VARIANT (1)..(17): Xaa = Any Amino Acid
CCEYXACNXPAXCXTGA

SEQ ID NO: 11285 - protein, 17 aa, Artificial Sequence
  Synthetically generated peptide
  VARIANT (1)..(17): Xaa = Any Amino Acid
CCEYXACNXPAXCTXGA

SEQ ID NO: 11286 - protein, 17 aa, Artificial Sequence
  Synthetically generated peptide
  VARIANT (1)..(17): Xaa = Any Amino Acid
CCEYXACNXPAXCTGXA

SEQ ID NO: 11287 - protein, 16 aa, Artificial Sequence
  Synthetically generated peptide
  VARIANT (1)..(16): Xaa = Any Amino Acid
CCEYXACNXPACXTGA

SEQ ID NO: 11288 - protein, 17 aa, Artificial Sequence
  Synthetically generated peptide
  VARIANT (1)..(17): Xaa = Any Amino Acid
CCEYXACNXPACXXTGA

SEQ ID NO: 11289 - protein, 17 aa, Artificial Sequence
  Synthetically generated peptide
  VARIANT (1)..(17): Xaa = Any Amino Acid
CCEYXACNXPACXTXGA

SEQ ID NO: 11290 - protein, 17 aa, Artificial Sequence
  Synthetically generated peptide
  VARIANT (1)..(17): Xaa = Any Amino Acid
CCEYXACNXPACXTGXA

SEQ ID NO: 11291 - protein, 16 aa, Artificial Sequence
  Synthetically generated peptide
  VARIANT (1)..(16): Xaa = Any Amino Acid
CCEYXACNXPACTXGA

SEQ ID NO: 11292 - protein, 17 aa, Artificial Sequence
  Synthetically generated peptide
  VARIANT (1)..(17): Xaa = Any Amino Acid
CCEYXACNXPACTXXGA

SEQ ID NO: 11293 - protein, 17 aa, Artificial Sequence
  Synthetically generated peptide
  VARIANT (1)..(17): Xaa = Any Amino Acid
CCEYXACNXPACTXGXA

SEQ ID NO: 11294 - protein, 16 aa, Artificial Sequence
  Synthetically generated peptide
  VARIANT (1)..(16): Xaa = Any Amino Acid
CCEYXACNXPACTGXA

SEQ ID NO: 11295 - protein, 17 aa, Artificial Sequence
  Synthetically generated peptide
  VARIANT (1)..(17): Xaa = Any Amino Acid
CCEYXACNXPACTGXXA

SEQ ID NO: 11296 - protein, 15 aa, Artificial Sequence
  Synthetically generated peptide
  VARIANT (1)..(15): Xaa = Any Amino Acid
CCEYXACNPXACTGA

SEQ ID NO: 11297 - protein, 16 aa, Artificial Sequence
  Synthetically generated peptide
  VARIANT (1)..(16): Xaa = Any Amino Acid
CCEYXACNPXXACTGA

SEQ ID NO: 11298 - protein, 17 aa, Artificial Sequence
  Synthetically generated peptide
  VARIANT (1)..(17): Xaa = Any Amino Acid
CCEYXACNPXXXACTGA

SEQ ID NO: 11299 - protein, 17 aa, Artificial Sequence
  Synthetically generated peptide
  VARIANT (1)..(17): Xaa = Any Amino Acid
CCEYXACNPXXAXCTGA

SEQ ID NO: 11300 - protein, 17 aa, Artificial Sequence
  Synthetically generated peptide
  VARIANT (1)..(17): Xaa = Any Amino Acid
CCEYXACNPXXACXTGA

SEQ ID NO: 11301 - protein, 17 aa, Artificial Sequence
  Synthetically generated peptide
  VARIANT (1)..(17): Xaa = Any Amino Acid
CCEYXACNPXXACTXGA

SEQ ID NO: 11302 - protein, 17 aa, Artificial Sequence
  Synthetically generated peptide
  VARIANT (1)..(17): Xaa = Any Amino Acid
CCEYXACNPXXACTGXA

SEQ ID NO: 11303 - protein, 16 aa, Artificial Sequence
  Synthetically generated peptide
  VARIANT (1)..(16): Xaa = Any Amino Acid
CCEYXACNPXAXCTGA

SEQ ID NO: 11304 - protein, 17 aa, Artificial Sequence
  Synthetically generated peptide
  VARIANT (1)..(17): Xaa = Any Amino Acid
CCEYXACNPXAXXCTGA

SEQ ID NO: 11305 - protein, 17 aa, Artificial Sequence
  Synthetically generated peptide
  VARIANT (1)..(17): Xaa = Any Amino Acid
CCEYXACNPXAXCXTGA

SEQ ID NO: 11306 - protein, 17 aa, Artificial Sequence
  Synthetically generated peptide
  VARIANT (1)..(17): Xaa = Any Amino Acid
CCEYXACNPXAXCTXGA

SEQ ID NO: 11307 - protein, 17 aa, Artificial Sequence
  Synthetically generated peptide
  VARIANT (1)..(17): Xaa = Any Amino Acid
CCEYXACNPXAXCTGXA

SEQ ID NO: 11308 - protein, 16 aa, Artificial Sequence
  Synthetically generated peptide
  VARIANT (1)..(16): Xaa = Any Amino Acid
CCEYXACNPXACXTGA

SEQ ID NO: 11309 - protein, 17 aa, Artificial Sequence
  Synthetically generated peptide
  VARIANT (1)..(17): Xaa = Any Amino Acid
CCEYXACNPXACXXTGA

SEQ ID NO: 11310 - protein, 17 aa, Artificial Sequence
  Synthetically generated peptide
  VARIANT (1)..(17): Xaa = Any Amino Acid
CCEYXACNPXACXTXGA

SEQ ID NO: 11311 - protein, 17 aa, Artificial Sequence
  Synthetically generated peptide
  VARIANT (1)..(17): Xaa = Any Amino Acid
CCEYXACNPXACXTGXA

SEQ ID NO: 11312 - protein, 16 aa, Artificial Sequence
  Synthetically generated peptide
  VARIANT (1)..(16): Xaa = Any Amino Acid
CCEYXACNPXACTXGA

SEQ ID NO: 11313 - protein, 17 aa, Artificial Sequence
  Synthetically generated peptide
  VARIANT (1)..(17): Xaa = Any Amino Acid
CCEYXACNPXACTXXGA

SEQ ID NO: 11314 - protein, 17 aa, Artificial Sequence
  Synthetically generated peptide
  VARIANT (1)..(17): Xaa = Any Amino Acid
CCEYXACNPXACTXGXA

SEQ ID NO: 11315 - protein, 16 aa, Artificial Sequence
  Synthetically generated peptide
  VARIANT (1)..(16): Xaa = Any Amino Acid
CCEYXACNPXACTGXA

SEQ ID NO: 11316 - protein, 17 aa, Artificial Sequence
  Synthetically generated peptide
  VARIANT (1)..(17): Xaa = Any Amino Acid
CCEYXACNPXACTGXXA

SEQ ID NO: 11317 - protein, 15 aa, Artificial Sequence
  Synthetically generated peptide
  VARIANT (1)..(15): Xaa = Any Amino Acid
CCEYXACNPAXCTGA

SEQ ID NO: 11318 - protein, 16 aa, Artificial Sequence
  Synthetically generated peptide
  VARIANT (1)..(16): Xaa = Any Amino Acid
CCEYXACNPAXXCTGA

SEQ ID NO: 11319 - protein, 17 aa, Artificial Sequence
  Synthetically generated peptide
  VARIANT (1)..(17): Xaa = Any Amino Acid
CCEYXACNPAXXXCTGA

SEQ ID NO: 11320 - protein, 17 aa, Artificial Sequence
  Synthetically generated peptide
  VARIANT (1)..(17): Xaa = Any Amino Acid
CCEYXACNPAXXCXTGA

SEQ ID NO: 11321 - protein, 17 aa, Artificial Sequence
  Synthetically generated peptide
  VARIANT (1)..(17): Xaa = Any Amino Acid
CCEYXACNPAXXCTXGA

SEQ ID NO: 11322 - protein, 17 aa, Artificial Sequence
  Synthetically generated peptide
  VARIANT (1)..(17): Xaa = Any Amino Acid
CCEYXACNPAXXCTGXA

SEQ ID NO: 11323 - protein, 16 aa, Artificial Sequence
  Synthetically generated peptide
  VARIANT (1)..(16): Xaa = Any Amino Acid
CCEYXACNPAXCXTGA

SEQ ID NO: 11324 - protein, 17 aa, Artificial Sequence
  Synthetically generated peptide
  VARIANT (1)..(17): Xaa = Any Amino Acid
CCEYXACNPAXCXXTGA

SEQ ID NO: 11325 - protein, 17 aa, Artificial Sequence
  Synthetically generated peptide
  VARIANT (1)..(17): Xaa = Any Amino Acid
CCEYXACNPAXCXTXGA

SEQ ID NO: 11326 - protein, 17 aa, Artificial Sequence
  Synthetically generated peptide
  VARIANT (1)..(17): Xaa = Any Amino Acid
CCEYXACNPAXCXTGXA

SEQ ID NO: 11327 - protein, 16 aa, Artificial Sequence
  Synthetically generated peptide
  VARIANT (1)..(16): Xaa = Any Amino Acid
CCEYXACNPAXCTXGA

SEQ ID NO: 11328 - protein, 17 aa, Artificial Sequence
  Synthetically generated peptide
  VARIANT (1)..(17): Xaa = Any Amino Acid
CCEYXACNPAXCTXXGA

SEQ ID NO: 11329 - protein, 17 aa, Artificial Sequence
  Synthetically generated peptide
  VARIANT (1)..(17): Xaa = Any Amino Acid
CCEYXACNPAXCTXGXA

SEQ ID NO: 11330 - protein, 16 aa, Artificial Sequence
  Synthetically generated peptide
  VARIANT (1)..(16): Xaa = Any Amino Acid
CCEYXACNPAXCTGXA

SEQ ID NO: 11331 - protein, 17 aa, Artificial Sequence
  Synthetically generated peptide
  VARIANT (1)..(17): Xaa = Any Amino Acid
CCEYXACNPAXCTGXXA

SEQ ID NO: 11332 - protein, 15 aa, Artificial Sequence
  Synthetically generated peptide
  VARIANT (1)..(15): Xaa = Any Amino Acid
CCEYXACNPACXTGA

SEQ ID NO: 11333 - protein, 16 aa, Artificial Sequence
  Synthetically generated peptide
  VARIANT (1)..(16): Xaa = Any Amino Acid
CCEYXACNPACXXTGA

SEQ ID NO: 11334 - protein, 17 aa, Artificial Sequence
  Synthetically generated peptide
  VARIANT (1)..(17): Xaa = Any Amino Acid
CCEYXACNPACXXXTGA

SEQ ID NO: 11335 - protein, 17 aa, Artificial Sequence
  Synthetically generated peptide
  VARIANT (1)..(17): Xaa = Any Amino Acid
CCEYXACNPACXXTXGA

SEQ ID NO: 11336 - protein, 17 aa, Artificial Sequence
  Synthetically generated peptide
  VARIANT (1)..(17): Xaa = Any Amino Acid
CCEYXACNPACXXTGXA

SEQ ID NO: 11337 - protein, 16 aa, Artificial Sequence
  Synthetically generated peptide
  VARIANT (1)..(16): Xaa = Any Amino Acid
CCEYXACNPACXTXGA

SEQ ID NO: 11338 - protein, 17 aa, Artificial Sequence
  Synthetically generated peptide
  VARIANT (1)..(17): Xaa = Any Amino Acid
CCEYXACNPACXTXXGA

SEQ ID NO: 11339 - protein, 17 aa, Artificial Sequence
  Synthetically generated peptide
  VARIANT (1)..(17): Xaa = Any Amino Acid
CCEYXACNPACXTXGXA

SEQ ID NO: 11340 - protein, 16 aa, Artificial Sequence
  Synthetically generated peptide
  VARIANT (1)..(16): Xaa = Any Amino Acid
CCEYXACNPACXTGXA

SEQ ID NO: 11341 - protein, 17 aa, Artificial Sequence
  Synthetically generated peptide
  VARIANT (1)..(17): Xaa = Any Amino Acid
CCEYXACNPACXTGXXA

SEQ ID NO: 11342 - protein, 15 aa, Artificial Sequence
  Synthetically generated peptide
  VARIANT (1)..(15): Xaa = Any Amino Acid
CCEYXACNPACTXGA

SEQ ID NO: 11343 - protein, 16 aa, Artificial Sequence
  Synthetically generated peptide
  VARIANT (1)..(16): Xaa = Any Amino Acid
CCEYXACNPACTXXGA

SEQ ID NO: 11344 - protein, 17 aa, Artificial Sequence
  Synthetically generated peptide
  VARIANT (1)..(17): Xaa = Any Amino Acid
CCEYXACNPACTXXXGA

SEQ ID NO: 11345 - protein, 17 aa, Artificial Sequence
  Synthetically generated peptide
  VARIANT (1)..(17): Xaa = Any Amino Acid
CCEYXACNPACTXXGXA

SEQ ID NO: 11346 - protein, 16 aa, Artificial Sequence
  Synthetically generated peptide
  VARIANT (1)..(16): Xaa = Any Amino Acid
CCEYXACNPACTXGXA

SEQ ID NO: 11347 - protein, 17 aa, Artificial Sequence
  Synthetically generated peptide
  VARIANT (1)..(17): Xaa = Any Amino Acid
CCEYXACNPACTXGXXA

SEQ ID NO: 11348 - protein, 15 aa, Artificial Sequence
  Synthetically generated peptide
  VARIANT (1)..(15): Xaa = Any Amino Acid
CCEYXACNPACTGXA

SEQ ID NO: 11349 - protein, 16 aa, Artificial Sequence
  Synthetically generated peptide
  VARIANT (1)..(16): Xaa = Any Amino Acid
CCEYXACNPACTGXXA

SEQ ID NO: 11350 - protein, 17 aa, Artificial Sequence
  Synthetically generated peptide
  VARIANT (1)..(17): Xaa = Any Amino Acid
CCEYXACNPACTGXXXA

SEQ ID NO: 11351 - protein, 14 aa, Artificial Sequence
  Synthetically generated peptide
  VARIANT (1)..(14): Xaa = Any Amino Acid
CCEYACXNPACTGA

SEQ ID NO: 11352 - protein, 15 aa, Artificial Sequence
  Synthetically generated peptide
  VARIANT (1)..(15): Xaa = Any Amino Acid
CCEYACXXNPACTGA

SEQ ID NO: 11353 - protein, 16 aa, Artificial Sequence
  Synthetically generated peptide
  VARIANT (1)..(16): Xaa = Any Amino Acid
CCEYACXXXNPACTGA

SEQ ID NO: 11354 - protein, 17 aa, Artificial Sequence
  Synthetically generated peptide
  VARIANT (1)..(17): Xaa = Any Amino Acid
CCEYACXXXXNPACTGA

SEQ ID NO: 11355 - protein, 17 aa, Artificial Sequence
  Synthetically generated peptide
  VARIANT (1)..(17): Xaa = Any Amino Acid
CCEYACXXXNXPACTGA

SEQ ID NO: 11356 - protein, 17 aa, Artificial Sequence
  Synthetically generated peptide
  VARIANT (1)..(17): Xaa = Any Amino Acid
CCEYACXXXNPXACTGA

SEQ ID NO: 11357 - protein, 17 aa, Artificial Sequence
  Synthetically generated peptide
  VARIANT (1)..(17): Xaa = Any Amino Acid
CCEYACXXXNPAXCTGA

SEQ ID NO: 11358 - protein, 17 aa, Artificial Sequence
  Synthetically generated peptide
  VARIANT (1)..(17): Xaa = Any Amino Acid
CCEYACXXXNPACXTGA

SEQ ID NO: 11359 - protein, 17 aa, Artificial Sequence
  Synthetically generated peptide
  VARIANT (1)..(17): Xaa = Any Amino Acid
CCEYACXXXNPACTXGA

SEQ ID NO: 11360 - protein, 17 aa, Artificial Sequence
  Synthetically generated peptide
  VARIANT (1)..(17): Xaa = Any Amino Acid
CCEYACXXXNPACTGXA

SEQ ID NO: 11361 - protein, 16 aa, Artificial Sequence
  Synthetically generated peptide
  VARIANT (1)..(16): Xaa = Any Amino Acid
CCEYACXXNXPACTGA

SEQ ID NO: 11362 - protein, 17 aa, Artificial Sequence
  Synthetically generated peptide
  VARIANT (1)..(17): Xaa = Any Amino Acid
CCEYACXXNXXPACTGA

SEQ ID NO: 11363 - protein, 17 aa, Artificial Sequence
  Synthetically generated peptide
  VARIANT (1)..(17): Xaa = Any Amino Acid
CCEYACXXNXPXACTGA

SEQ ID NO: 11364 - protein, 17 aa, Artificial Sequence
  Synthetically generated peptide
  VARIANT (1)..(17): Xaa = Any Amino Acid
CCEYACXXNXPAXCTGA

SEQ ID NO: 11365 - protein, 17 aa, Artificial Sequence
  Synthetically generated peptide
  VARIANT (1)..(17): Xaa = Any Amino Acid
CCEYACXXNXPACXTGA

SEQ ID NO: 11366 - protein, 17 aa, Artificial Sequence
  Synthetically generated peptide
  VARIANT (1)..(17): Xaa = Any Amino Acid
CCEYACXXNXPACTXGA

SEQ ID NO: 11367 - protein, 17 aa, Artificial Sequence
  Synthetically generated peptide
  VARIANT (1)..(17): Xaa = Any Amino Acid
CCEYACXXNXPACTGXA

SEQ ID NO: 11368 - protein, 16 aa, Artificial Sequence
  Synthetically generated peptide
  VARIANT (1)..(16): Xaa = Any Amino Acid
CCEYACXXNPXACTGA

SEQ ID NO: 11369 - protein, 17 aa, Artificial Sequence
  Synthetically generated peptide
  VARIANT (1)..(17): Xaa = Any Amino Acid
CCEYACXXNPXXACTGA

SEQ ID NO: 11370 - protein, 17 aa, Artificial Sequence
  Synthetically generated peptide
  VARIANT (1)..(17): Xaa = Any Amino Acid
CCEYACXXNPXAXCTGA

SEQ ID NO: 11371 - protein, 17 aa, Artificial Sequence
  Synthetically generated peptide
  VARIANT (1)..(17): Xaa = Any Amino Acid
CCEYACXXNPXACXTGA

SEQ ID NO: 11372 - protein, 17 aa, Artificial Sequence
  Synthetically generated peptide
  VARIANT (1)..(17): Xaa = Any Amino Acid
CCEYACXXNPXACTXGA

SEQ ID NO: 11373 - protein, 17 aa, Artificial Sequence
  Synthetically generated peptide
  VARIANT (1)..(17): Xaa = Any Amino Acid
CCEYACXXNPXACTGXA

SEQ ID NO: 11374 - protein, 16 aa, Artificial Sequence
  Synthetically generated peptide
  VARIANT (1)..(16): Xaa = Any Amino Acid
CCEYACXXNPAXCTGA

SEQ ID NO: 11375 - protein, 17 aa, Artificial Sequence
  Synthetically generated peptide
  VARIANT (1)..(17): Xaa = Any Amino Acid
CCEYACXXNPAXXCTGA

SEQ ID NO: 11376 - protein, 17 aa, Artificial Sequence
  Synthetically generated peptide
  VARIANT (1)..(17): Xaa = Any Amino Acid
CCEYACXXNPAXCXTGA

SEQ ID NO: 11377 - protein, 17 aa, Artificial Sequence
  Synthetically generated peptide
  VARIANT (1)..(17): Xaa = Any Amino Acid
CCEYACXXNPAXCTXGA

SEQ ID NO: 11378 - protein, 17 aa, Artificial Sequence
  Synthetically generated peptide
  VARIANT (1)..(17): Xaa = Any Amino Acid
CCEYACXXNPAXCTGXA

SEQ ID NO: 11379 - protein, 16 aa, Artificial Sequence
  Synthetically generated peptide
  VARIANT (1)..(16): Xaa = Any Amino Acid
CCEYACXXNPACXTGA

SEQ ID NO: 11380 - protein, 17 aa, Artificial Sequence
  Synthetically generated peptide
  VARIANT (1)..(17): Xaa = Any Amino Acid
CCEYACXXNPACXXTGA

SEQ ID NO: 11381 - protein, 17 aa, Artificial Sequence
  Synthetically generated peptide
  VARIANT (1)..(17): Xaa = Any Amino Acid
CCEYACXXNPACXTXGA

SEQ ID NO: 11382 - protein, 17 aa, Artificial Sequence
  Synthetically generated peptide
  VARIANT (1)..(17): Xaa = Any Amino Acid
CCEYACXXNPACXTGXA

SEQ ID NO: 11383 - protein, 16 aa, Artificial Sequence
  Synthetically generated peptide
  VARIANT (1)..(16): Xaa = Any Amino Acid
CCEYACXXNPACTXGA

SEQ ID NO: 11384 - protein, 17 aa, Artificial Sequence
  Synthetically generated peptide
  VARIANT (1)..(17): Xaa = Any Amino Acid
CCEYACXXNPACTXXGA

SEQ ID NO: 11385 - protein, 17 aa, Artificial Sequence
  Synthetically generated peptide
  VARIANT (1)..(17): Xaa = Any Amino Acid
CCEYACXXNPACTXGXA

SEQ ID NO: 11386 - protein, 16 aa, Artificial Sequence
  Synthetically generated peptide
  VARIANT (1)..(16): Xaa = Any Amino Acid
CCEYACXXNPACTGXA

SEQ ID NO: 11387 - protein, 17 aa, Artificial Sequence
  Synthetically generated peptide
  VARIANT (1)..(17): Xaa = Any Amino Acid
CCEYACXXNPACTGXXA

SEQ ID NO: 11388 - protein, 15 aa, Artificial Sequence
  Synthetically generated peptide
  VARIANT (1)..(15): Xaa = Any Amino Acid
CCEYACXNXPACTGA

SEQ ID NO: 11389 - protein, 16 aa, Artificial Sequence
  Synthetically generated peptide
  VARIANT (1)..(16): Xaa = Any Amino Acid
CCEYACXNXXPACTGA

SEQ ID NO: 11390 - protein, 17 aa, Artificial Sequence
  Synthetically generated peptide
  VARIANT (1)..(17): Xaa = Any Amino Acid
CCEYACXNXXXPACTGA

SEQ ID NO: 11391 - protein, 17 aa, Artificial Sequence
  Synthetically generated peptide
  VARIANT (1)..(17): Xaa = Any Amino Acid
CCEYACXNXXPXACTGA

SEQ ID NO: 11392 - protein, 17 aa, Artificial Sequence
  Synthetically generated peptide
  VARIANT (1)..(17): Xaa = Any Amino Acid
CCEYACXNXXPAXCTGA

SEQ ID NO: 11393 - protein, 17 aa, Artificial Sequence
  Synthetically generated peptide
  VARIANT (1)..(17): Xaa = Any Amino Acid
CCEYACXNXXPACXTGA

SEQ ID NO: 11394 - protein, 17 aa, Artificial Sequence
  Synthetically generated peptide
  VARIANT (1)..(17): Xaa = Any Amino Acid
CCEYACXNXXPACTXGA

SEQ ID NO: 11395 - protein, 17 aa, Artificial Sequence
  Synthetically generated peptide
  VARIANT (1)..(17): Xaa = Any Amino Acid
CCEYACXNXXPACTGXA

SEQ ID NO: 11396 - protein, 16 aa, Artificial Sequence
  Synthetically generated peptide
  VARIANT (1)..(16): Xaa = Any Amino Acid
CCEYACXNXPXACTGA

SEQ ID NO: 11397 - protein, 17 aa, Artificial Sequence
  Synthetically generated peptide
  VARIANT (1)..(17): Xaa = Any Amino Acid
CCEYACXNXPXXACTGA

SEQ ID NO: 11398 - protein, 17 aa, Artificial Sequence
  Synthetically generated peptide
  VARIANT (1)..(17): Xaa = Any Amino Acid
CCEYACXNXPXAXCTGA

SEQ ID NO: 11399 - protein, 17 aa, Artificial Sequence
  Synthetically generated peptide
  VARIANT (1)..(17): Xaa = Any Amino Acid
CCEYACXNXPXACXTGA

SEQ ID NO: 11400 - protein, 17 aa, Artificial Sequence
  Synthetically generated peptide
  VARIANT (1)..(17): Xaa = Any Amino Acid
CCEYACXNXPXACTXGA

SEQ ID NO: 11401 - protein, 17 aa, Artificial Sequence
  Synthetically generated peptide
  VARIANT (1)..(17): Xaa = Any Amino Acid
CCEYACXNXPXACTGXA

SEQ ID NO: 11402 - protein, 16 aa, Artificial Sequence
  Synthetically generated peptide
  VARIANT (1)..(16): Xaa = Any Amino Acid
CCEYACXNXPAXCTGA

SEQ ID NO: 11403 - protein, 17 aa, Artificial Sequence
  Synthetically generated peptide
  VARIANT (1)..(17): Xaa = Any Amino Acid
CCEYACXNXPAXXCTGA

SEQ ID NO: 11404 - protein, 17 aa, Artificial Sequence
  Synthetically generated peptide
  VARIANT (1)..(17): Xaa = Any Amino Acid
CCEYACXNXPAXCXTGA

SEQ ID NO: 11405 - protein, 17 aa, Artificial Sequence
  Synthetically generated peptide
  VARIANT (1)..(17): Xaa = Any Amino Acid
CCEYACXNXPAXCTXGA

SEQ ID NO: 11406 - protein, 17 aa, Artificial Sequence
  Synthetically generated peptide
  VARIANT (1)..(17): Xaa = Any Amino Acid
CCEYACXNXPAXCTGXA

SEQ ID NO: 11407 - protein, 16 aa, Artificial Sequence
  Synthetically generated peptide
  VARIANT (1)..(16): Xaa = Any Amino Acid
CCEYACXNXPACXTGA

SEQ ID NO: 11408 - protein, 17 aa, Artificial Sequence
  Synthetically generated peptide
  VARIANT (1)..(17): Xaa = Any Amino Acid
CCEYACXNXPACXXTGA

SEQ ID NO: 11409 - protein, 17 aa, Artificial Sequence
  Synthetically generated peptide
  VARIANT (1)..(17): Xaa = Any Amino Acid
CCEYACXNXPACXTXGA

SEQ ID NO: 11410 - protein, 17 aa, Artificial Sequence
  Synthetically generated peptide
  VARIANT (1)..(17): Xaa = Any Amino Acid
CCEYACXNXPACXTGXA

SEQ ID NO: 11411 - protein, 16 aa, Artificial Sequence
  Synthetically generated peptide
  VARIANT (1)..(16): Xaa = Any Amino Acid
CCEYACXNXPACTXGA

SEQ ID NO: 11412 - protein, 17 aa, Artificial Sequence
  Synthetically generated peptide
  VARIANT (1)..(17): Xaa = Any Amino Acid
CCEYACXNXPACTXXGA

SEQ ID NO: 11413 - protein, 17 aa, Artificial Sequence
  Synthetically generated peptide
  VARIANT (1)..(17): Xaa = Any Amino Acid
CCEYACXNXPACTXGXA

SEQ ID NO: 11414 - protein, 16 aa, Artificial Sequence
  Synthetically generated peptide
  VARIANT (1)..(16): Xaa = Any Amino Acid
CCEYACXNXPACTGXA

SEQ ID NO: 11415 - protein, 17 aa, Artificial Sequence
  Synthetically generated peptide
  VARIANT (1)..(17): Xaa = Any Amino Acid
CCEYACXNXPACTGXXA

SEQ ID NO: 11416 - protein, 15 aa, Artificial Sequence
  Synthetically generated peptide
  VARIANT (1)..(15): Xaa = Any Amino Acid
CCEYACXNPXACTGA

SEQ ID NO: 11417 - protein, 16 aa, Artificial Sequence
  Synthetically generated peptide
  VARIANT (1)..(16): Xaa = Any Amino Acid
CCEYACXNPXXACTGA

SEQ ID NO: 11418 - protein, 17 aa, Artificial Sequence
  Synthetically generated peptide
  VARIANT (1)..(17): Xaa = Any Amino Acid
CCEYACXNPXXXACTGA

SEQ ID NO: 11419 - protein, 17 aa, Artificial Sequence
  Synthetically generated peptide
  VARIANT (1)..(17): Xaa = Any Amino Acid
CCEYACXNPXXAXCTGA

SEQ ID NO: 11420 - protein, 17 aa, Artificial Sequence
  Synthetically generated peptide
  VARIANT (1)..(17): Xaa = Any Amino Acid
CCEYACXNPXXACXTGA

SEQ ID NO: 11421 - protein, 17 aa, Artificial Sequence
  Synthetically generated peptide
  VARIANT (1)..(17): Xaa = Any Amino Acid
CCEYACXNPXXACTXGA

SEQ ID NO: 11422 - protein, 17 aa, Artificial Sequence
  Synthetically generated peptide
  VARIANT (1)..(17): Xaa = Any Amino Acid
CCEYACXNPXXACTGXA

SEQ ID NO: 11423 - protein, 16 aa, Artificial Sequence
  Synthetically generated peptide
  VARIANT (1)..(16): Xaa = Any Amino Acid
CCEYACXNPXAXCTGA

SEQ ID NO: 11424 - protein, 17 aa, Artificial Sequence
  Synthetically generated peptide
  VARIANT (1)..(17): Xaa = Any Amino Acid
CCEYACXNPXAXXCTGA

SEQ ID NO: 11425 - protein, 17 aa, Artificial Sequence
  Synthetically generated peptide
  VARIANT (1)..(17): Xaa = Any Amino Acid
CCEYACXNPXAXCXTGA

SEQ ID NO: 11426 - protein, 17 aa, Artificial Sequence
  Synthetically generated peptide
  VARIANT (1)..(17): Xaa = Any Amino Acid
CCEYACXNPXAXCTXGA

SEQ ID NO: 11427 - protein, 17 aa, Artificial Sequence
  Synthetically generated peptide
  VARIANT (1)..(17): Xaa = Any Amino Acid
CCEYACXNPXAXCTGXA

SEQ ID NO: 11428 - protein, 16 aa, Artificial Sequence
  Synthetically generated peptide
  VARIANT (1)..(16): Xaa = Any Amino Acid
CCEYACXNPXACXTGA

SEQ ID NO: 11429 - protein, 17 aa, Artificial Sequence
  Synthetically generated peptide
  VARIANT (1)..(17): Xaa = Any Amino Acid
CCEYACXNPXACXXTGA

SEQ ID NO: 11430 - protein, 17 aa, Artificial Sequence
  Synthetically generated peptide
  VARIANT (1)..(17): Xaa = Any Amino Acid
CCEYACXNPXACXTXGA

SEQ ID NO: 11431 - protein, 17 aa, Artificial Sequence
  Synthetically generated peptide
  VARIANT (1)..(17): Xaa = Any Amino Acid
CCEYACXNPXACXTGXA

SEQ ID NO: 11432 - protein, 16 aa, Artificial Sequence
  Synthetically generated peptide
  VARIANT (1)..(16): Xaa = Any Amino Acid
CCEYACXNPXACTXGA

SEQ ID NO: 11433 - protein, 17 aa, Artificial Sequence
  Synthetically generated peptide
  VARIANT (1)..(17): Xaa = Any Amino Acid
CCEYACXNPXACTXXGA

SEQ ID NO: 11434 - protein, 17 aa, Artificial Sequence
  Synthetically generated peptide
  VARIANT (1)..(17): Xaa = Any Amino Acid
CCEYACXNPXACTXGXA

SEQ ID NO: 11435 - protein, 16 aa, Artificial Sequence
  Synthetically generated peptide
  VARIANT (1)..(16): Xaa = Any Amino Acid
CCEYACXNPXACTGXA

SEQ ID NO: 11436 - protein, 17 aa, Artificial Sequence
  Synthetically generated peptide
  VARIANT (1)..(17): Xaa = Any Amino Acid
CCEYACXNPXACTGXXA

SEQ ID NO: 11437 - protein, 15 aa, Artificial Sequence
  Synthetically generated peptide
  VARIANT (1)..(15): Xaa = Any Amino Acid
CCEYACXNPAXCTGA

SEQ ID NO: 11438 - protein, 16 aa, Artificial Sequence
  Synthetically generated peptide
  VARIANT (1)..(16): Xaa = Any Amino Acid
CCEYACXNPAXXCTGA

SEQ ID NO: 11439 - protein, 17 aa, Artificial Sequence
  Synthetically generated peptide
  VARIANT (1)..(17): Xaa = Any Amino Acid
CCEYACXNPAXXXCTGA

SEQ ID NO: 11440 - protein, 17 aa, Artificial Sequence
  Synthetically generated peptide
  VARIANT (1)..(17): Xaa = Any Amino Acid
CCEYACXNPAXXCXTGA

SEQ ID NO: 11441 - protein, 17 aa, Artificial Sequence
  Synthetically generated peptide
  VARIANT (1)..(17): Xaa = Any Amino Acid
CCEYACXNPAXXCTXGA

SEQ ID NO: 11442 - protein, 17 aa, Artificial Sequence
  Synthetically generated peptide
  VARIANT (1)..(17): Xaa = Any Amino Acid
CCEYACXNPAXXCTGXA

SEQ ID NO: 11443 - protein, 16 aa, Artificial Sequence
  Synthetically generated peptide
  VARIANT (1)..(16): Xaa = Any Amino Acid
CCEYACXNPAXCXTGA

SEQ ID NO: 11444 - protein, 17 aa, Artificial Sequence
  Synthetically generated peptide
  VARIANT (1)..(17): Xaa = Any Amino Acid
CCEYACXNPAXCXXTGA

SEQ ID NO: 11445 - protein, 17 aa, Artificial Sequence
  Synthetically generated peptide
  VARIANT (1)..(17): Xaa = Any Amino Acid
CCEYACXNPAXCXTXGA

SEQ ID NO: 11446 - protein, 17 aa, Artificial Sequence
  Synthetically generated peptide
  VARIANT (1)..(17): Xaa = Any Amino Acid
CCEYACXNPAXCXTGXA

SEQ ID NO: 11447 - protein, 16 aa, Artificial Sequence
  Synthetically generated peptide
  VARIANT (1)..(16): Xaa = Any Amino Acid
CCEYACXNPAXCTXGA

SEQ ID NO: 11448 - protein, 17 aa, Artificial Sequence
  Synthetically generated peptide
  VARIANT (1)..(17): Xaa = Any Amino Acid
CCEYACXNPAXCTXXGA

SEQ ID NO: 11449 - protein, 17 aa, Artificial Sequence
  Synthetically generated peptide
  VARIANT (1)..(17): Xaa = Any Amino Acid
CCEYACXNPAXCTXGXA

SEQ ID NO: 11450 - protein, 16 aa, Artificial Sequence
  Synthetically generated peptide
  VARIANT (1)..(16): Xaa = Any Amino Acid
CCEYACXNPAXCTGXA

SEQ ID NO: 11451 - protein, 17 aa, Artificial Sequence
  Synthetically generated peptide
  VARIANT (1)..(17): Xaa = Any Amino Acid
CCEYACXNPAXCTGXXA

SEQ ID NO: 11452 - protein, 15 aa, Artificial Sequence
  Synthetically generated peptide
  VARIANT (1)..(15): Xaa = Any Amino Acid
CCEYACXNPACXTGA

SEQ ID NO: 11453 - protein, 16 aa, Artificial Sequence
  Synthetically generated peptide
  VARIANT (1)..(16): Xaa = Any Amino Acid
CCEYACXNPACXXTGA

SEQ ID NO: 11454 - protein, 17 aa, Artificial Sequence
  Synthetically generated peptide
  VARIANT (1)..(17): Xaa = Any Amino Acid
CCEYACXNPACXXXTGA

SEQ ID NO: 11455 - protein, 17 aa, Artificial Sequence
  Synthetically generated peptide
  VARIANT (1)..(17): Xaa = Any Amino Acid
CCEYACXNPACXXTXGA

SEQ ID NO: 11456 - protein, 17 aa, Artificial Sequence
  Synthetically generated peptide
  VARIANT (1)..(17): Xaa = Any Amino Acid
CCEYACXNPACXXTGXA

SEQ ID NO: 11457 - protein, 16 aa, Artificial Sequence
  Synthetically generated peptide
  VARIANT (1)..(16): Xaa = Any Amino Acid
CCEYACXNPACXTXGA

SEQ ID NO: 11458 - protein, 17 aa, Artificial Sequence
  Synthetically generated peptide
  VARIANT (1)..(17): Xaa = Any Amino Acid
CCEYACXNPACXTXXGA

SEQ ID NO: 11459 - protein, 17 aa, Artificial Sequence
  Synthetically generated peptide
  VARIANT (1)..(17): Xaa = Any Amino Acid
CCEYACXNPACXTXGXA

SEQ ID NO: 11460 - protein, 16 aa, Artificial Sequence
  Synthetically generated peptide
  VARIANT (1)..(16): Xaa = Any Amino Acid
CCEYACXNPACXTGXA

SEQ ID NO: 11461 - protein, 17 aa, Artificial Sequence
  Synthetically generated peptide
  VARIANT (1)..(17): Xaa = Any Amino Acid
CCEYACXNPACXTGXXA

SEQ ID NO: 11462 - protein, 15 aa, Artificial Sequence
  Synthetically generated peptide
  VARIANT (1)..(15): Xaa = Any Amino Acid
CCEYACXNPACTXGA

SEQ ID NO: 11463 - protein, 16 aa, Artificial Sequence
  Synthetically generated peptide
  VARIANT (1)..(16): Xaa = Any Amino Acid
CCEYACXNPACTXXGA

SEQ ID NO: 11464 - protein, 17 aa, Artificial Sequence
  Synthetically generated peptide
  VARIANT (1)..(17): Xaa = Any Amino Acid
CCEYACXNPACTXXXGA

SEQ ID NO: 11465 - protein, 17 aa, Artificial Sequence
  Synthetically generated peptide
  VARIANT (1)..(17): Xaa = Any Amino Acid
CCEYACXNPACTXXGXA

SEQ ID NO: 11466 - protein, 16 aa, Artificial Sequence
  Synthetically generated peptide
  VARIANT (1)..(16): Xaa = Any Amino Acid
CCEYACXNPACTXGXA

SEQ ID NO: 11467 - protein, 17 aa, Artificial Sequence
  Synthetically generated peptide
  VARIANT (1)..(17): Xaa = Any Amino Acid
CCEYACXNPACTXGXXA

SEQ ID NO: 11468 - protein, 15 aa, Artificial Sequence
  Synthetically generated peptide
  VARIANT (1)..(15): Xaa = Any Amino Acid
CCEYACXNPACTGXA

SEQ ID NO: 11469 - protein, 16 aa, Artificial Sequence
  Synthetically generated peptide
  VARIANT (1)..(16): Xaa = Any Amino Acid
CCEYACXNPACTGXXA

SEQ ID NO: 11470 - protein, 17 aa, Artificial Sequence
  Synthetically generated peptide
  VARIANT (1)..(17): Xaa = Any Amino Acid
CCEYACXNPACTGXXXA

SEQ ID NO: 11471 - protein, 14 aa, Artificial Sequence
  Synthetically generated peptide
  VARIANT (1)..(14): Xaa = Any Amino Acid
CCEYACNXPACTGA

SEQ ID NO: 11472 - protein, 15 aa, Artificial Sequence
  Synthetically generated peptide
  VARIANT (1)..(15): Xaa = Any Amino Acid
CCEYACNXXPACTGA

SEQ ID NO: 11473 - protein, 16 aa, Artificial Sequence
  Synthetically generated peptide
  VARIANT (1)..(16): Xaa = Any Amino Acid
CCEYACNXXXPACTGA

SEQ ID NO: 11474 - protein, 17 aa, Artificial Sequence
  Synthetically generated peptide
  VARIANT (1)..(17): Xaa = Any Amino Acid
CCEYACNXXXXPACTGA

SEQ ID NO: 11475 - protein, 17 aa, Artificial Sequence
  Synthetically generated peptide
  VARIANT (1)..(17): Xaa = Any Amino Acid
CCEYACNXXXPXACTGA

SEQ ID NO: 11476 - protein, 17 aa, Artificial Sequence
  Synthetically generated peptide
  VARIANT (1)..(17): Xaa = Any Amino Acid
CCEYACNXXXPAXCTGA

SEQ ID NO: 11477 - protein, 17 aa, Artificial Sequence
  Synthetically generated peptide
  VARIANT (1)..(17): Xaa = Any Amino Acid
CCEYACNXXXPACXTGA

SEQ ID NO: 11478 - protein, 17 aa, Artificial Sequence
  Synthetically generated peptide
  VARIANT (1)..(17): Xaa = Any Amino Acid
CCEYACNXXXPACTXGA

SEQ ID NO: 11479 - protein, 17 aa, Artificial Sequence
  Synthetically generated peptide
  VARIANT (1)..(17): Xaa = Any Amino Acid
CCEYACNXXXPACTGXA

SEQ ID NO: 11480 - protein, 16 aa, Artificial Sequence
  Synthetically generated peptide
  VARIANT (1)..(16): Xaa = Any Amino Acid
CCEYACNXXPXACTGA

SEQ ID NO: 11481 - protein, 17 aa, Artificial Sequence
  Synthetically generated peptide
  VARIANT (1)..(17): Xaa = Any Amino Acid
CCEYACNXXPXXACTGA

SEQ ID NO: 11482 - protein, 17 aa, Artificial Sequence
  Synthetically generated peptide
  VARIANT (1)..(17): Xaa = Any Amino Acid
CCEYACNXXPXAXCTGA

SEQ ID NO: 11483 - protein, 17 aa, Artificial Sequence
  Synthetically generated peptide
  VARIANT (1)..(17): Xaa = Any Amino Acid
CCEYACNXXPXACXTGA

SEQ ID NO: 11484 - protein, 17 aa, Artificial Sequence
  Synthetically generated peptide
  VARIANT (1)..(17): Xaa = Any Amino Acid
CCEYACNXXPXACTXGA

SEQ ID NO: 11485 - protein, 17 aa, Artificial Sequence
  Synthetically generated peptide
  VARIANT (1)..(17): Xaa = Any Amino Acid
CCEYACNXXPXACTGXA

SEQ ID NO: 11486 - protein, 16 aa, Artificial Sequence
  Synthetically generated peptide
  VARIANT (1)..(16): Xaa = Any Amino Acid
CCEYACNXXPAXCTGA

SEQ ID NO: 11487 - protein, 17 aa, Artificial Sequence
  Synthetically generated peptide
  VARIANT (1)..(17): Xaa = Any Amino Acid
CCEYACNXXPAXXCTGA

SEQ ID NO: 11488 - protein, 17 aa, Artificial Sequence
  Synthetically generated peptide
  VARIANT (1)..(17): Xaa = Any Amino Acid
CCEYACNXXPAXCXTGA

SEQ ID NO: 11489 - protein, 17 aa, Artificial Sequence
  Synthetically generated peptide
  VARIANT (1)..(17): Xaa = Any Amino Acid
CCEYACNXXPAXCTXGA

SEQ ID NO: 11490 - protein, 17 aa, Artificial Sequence
  Synthetically generated peptide
  VARIANT (1)..(17): Xaa = Any Amino Acid
CCEYACNXXPAXCTGXA

SEQ ID NO: 11491 - protein, 16 aa, Artificial Sequence
  Synthetically generated peptide
  VARIANT (1)..(16): Xaa = Any Amino Acid
CCEYACNXXPACXTGA

SEQ ID NO: 11492 - protein, 17 aa, Artificial Sequence
  Synthetically generated peptide
  VARIANT (1)..(17): Xaa = Any Amino Acid
CCEYACNXXPACXXTGA

SEQ ID NO: 11493 - protein, 17 aa, Artificial Sequence
  Synthetically generated peptide
  VARIANT (1)..(17): Xaa = Any Amino Acid
CCEYACNXXPACXTXGA

SEQ ID NO: 11494 - protein, 17 aa, Artificial Sequence
  Synthetically generated peptide
  VARIANT (1)..(17): Xaa = Any Amino Acid
CCEYACNXXPACXTGXA

SEQ ID NO: 11495 - protein, 16 aa, Artificial Sequence
  Synthetically generated peptide
  VARIANT (1)..(16): Xaa = Any Amino Acid
CCEYACNXXPACTXGA

SEQ ID NO: 11496 - protein, 17 aa, Artificial Sequence
  Synthetically generated peptide
  VARIANT (1)..(17): Xaa = Any Amino Acid
CCEYACNXXPACTXXGA

SEQ ID NO: 11497 - protein, 17 aa, Artificial Sequence
  Synthetically generated peptide
  VARIANT (1)..(17): Xaa = Any Amino Acid
CCEYACNXXPACTXGXA

SEQ ID NO: 11498 - protein, 16 aa, Artificial Sequence
  Synthetically generated peptide
  VARIANT (1)..(16): Xaa = Any Amino Acid
CCEYACNXXPACTGXA

SEQ ID NO: 11499 - protein, 17 aa, Artificial Sequence
  Synthetically generated peptide
  VARIANT (1)..(17): Xaa = Any Amino Acid
CCEYACNXXPACTGXXA

SEQ ID NO: 11500 - protein, 15 aa, Artificial Sequence
  Synthetically generated peptide
  VARIANT (1)..(15): Xaa = Any Amino Acid
CCEYACNXPXACTGA

SEQ ID NO: 11501 - protein, 16 aa, Artificial Sequence
  Synthetically generated peptide
  VARIANT (1)..(16): Xaa = Any Amino Acid
CCEYACNXPXXACTGA

SEQ ID NO: 11502 - protein, 17 aa, Artificial Sequence
  Synthetically generated peptide
  VARIANT (1)..(17): Xaa = Any Amino Acid
CCEYACNXPXXXACTGA

SEQ ID NO: 11503 - protein, 17 aa, Artificial Sequence
  Synthetically generated peptide
  VARIANT (1)..(17): Xaa = Any Amino Acid
CCEYACNXPXXAXCTGA

SEQ ID NO: 11504 - protein, 17 aa, Artificial Sequence
  Synthetically generated peptide
  VARIANT (1)..(17): Xaa = Any Amino Acid
CCEYACNXPXXACXTGA

SEQ ID NO: 11505 - protein, 17 aa, Artificial Sequence
  Synthetically generated peptide
  VARIANT (1)..(17): Xaa = Any Amino Acid
CCEYACNXPXXACTXGA

SEQ ID NO: 11506 - protein, 17 aa, Artificial Sequence
  Synthetically generated peptide
  VARIANT (1)..(17): Xaa = Any Amino Acid
CCEYACNXPXXACTGXA

SEQ ID NO: 11507 - protein, 16 aa, Artificial Sequence
  Synthetically generated peptide
  VARIANT (1)..(16): Xaa = Any Amino Acid
CCEYACNXPXAXCTGA

SEQ ID NO: 11508 - protein, 17 aa, Artificial Sequence
  Synthetically generated peptide
  VARIANT (1)..(17): Xaa = Any Amino Acid
CCEYACNXPXAXXCTGA

SEQ ID NO: 11509 - protein, 17 aa, Artificial Sequence
  Synthetically generated peptide
  VARIANT (1)..(17): Xaa = Any Amino Acid
CCEYACNXPXAXCXTGA

SEQ ID NO: 11510 - protein, 17 aa, Artificial Sequence
  Synthetically generated peptide
  VARIANT (1)..(17): Xaa = Any Amino Acid
CCEYACNXPXAXCTXGA

SEQ ID NO: 11511 - protein, 17 aa, Artificial Sequence
  Synthetically generated peptide
  VARIANT (1)..(17): Xaa = Any Amino Acid
CCEYACNXPXAXCTGXA

SEQ ID NO: 11512 - protein, 16 aa, Artificial Sequence
  Synthetically generated peptide
  VARIANT (1)..(16): Xaa = Any Amino Acid
CCEYACNXPXACXTGA

SEQ ID NO: 11513 - protein, 17 aa, Artificial Sequence
  Synthetically generated peptide
  VARIANT (1)..(17): Xaa = Any Amino Acid
CCEYACNXPXACXXTGA

SEQ ID NO: 11514 - protein, 17 aa, Artificial Sequence
  Synthetically generated peptide
  VARIANT (1)..(17): Xaa = Any Amino Acid
CCEYACNXPXACXTXGA

SEQ ID NO: 11515 - protein, 17 aa, Artificial Sequence
  Synthetically generated peptide
  VARIANT (1)..(17): Xaa = Any Amino Acid
CCEYACNXPXACXTGXA

SEQ ID NO: 11516 - protein, 16 aa, Artificial Sequence
  Synthetically generated peptide
  VARIANT (1)..(16): Xaa = Any Amino Acid
CCEYACNXPXACTXGA

SEQ ID NO: 11517 - protein, 17 aa, Artificial Sequence
  Synthetically generated peptide
  VARIANT (1)..(17): Xaa = Any Amino Acid
CCEYACNXPXACTXXGA

SEQ ID NO: 11518 - protein, 17 aa, Artificial Sequence
  Synthetically generated peptide
  VARIANT (1)..(17): Xaa = Any Amino Acid
CCEYACNXPXACTXGXA

SEQ ID NO: 11519 - protein, 16 aa, Artificial Sequence
  Synthetically generated peptide
  VARIANT (1)..(16): Xaa = Any Amino Acid
CCEYACNXPXACTGXA

SEQ ID NO: 11520 - protein, 17 aa, Artificial Sequence
  Synthetically generated peptide
  VARIANT (1)..(17): Xaa = Any Amino Acid
CCEYACNXPXACTGXXA

SEQ ID NO: 11521 - protein, 15 aa, Artificial Sequence
  Synthetically generated peptide
  VARIANT (1)..(15): Xaa = Any Amino Acid
CCEYACNXPAXCTGA

SEQ ID NO: 11522 - protein, 16 aa, Artificial Sequence
  Synthetically generated peptide
  VARIANT (1)..(16): Xaa = Any Amino Acid
CCEYACNXPAXXCTGA

SEQ ID NO: 11523 - protein, 17 aa, Artificial Sequence
  Synthetically generated peptide
  VARIANT (1)..(17): Xaa = Any Amino Acid
CCEYACNXPAXXXCTGA

SEQ ID NO: 11524 - protein, 17 aa, Artificial Sequence
  Synthetically generated peptide
  VARIANT (1)..(17): Xaa = Any Amino Acid
CCEYACNXPAXXCXTGA

SEQ ID NO: 11525 - protein, 17 aa, Artificial Sequence
  Synthetically generated peptide
  VARIANT (1)..(17): Xaa = Any Amino Acid
CCEYACNXPAXXCTXGA

SEQ ID NO: 11526 - protein, 17 aa, Artificial Sequence
  Synthetically generated peptide
  VARIANT (1)..(17): Xaa = Any Amino Acid
CCEYACNXPAXXCTGXA

SEQ ID NO: 11527 - protein, 16 aa, Artificial Sequence
  Synthetically generated peptide
  VARIANT (1)..(16): Xaa = Any Amino Acid
CCEYACNXPAXCXTGA

SEQ ID NO: 11528 - protein, 17 aa, Artificial Sequence
  Synthetically generated peptide
  VARIANT (1)..(17): Xaa = Any Amino Acid
CCEYACNXPAXCXXTGA

SEQ ID NO: 11529 - protein, 17 aa, Artificial Sequence
  Synthetically generated peptide
  VARIANT (1)..(17): Xaa = Any Amino Acid
CCEYACNXPAXCXTXGA

SEQ ID NO: 11530 - protein, 17 aa, Artificial Sequence
  Synthetically generated peptide
  VARIANT (1)..(17): Xaa = Any Amino Acid
CCEYACNXPAXCXTGXA

SEQ ID NO: 11531 - protein, 16 aa, Artificial Sequence
  Synthetically generated peptide
  VARIANT (1)..(16): Xaa = Any Amino Acid
CCEYACNXPAXCTXGA

SEQ ID NO: 11532 - protein, 17 aa, Artificial Sequence
  Synthetically generated peptide
  VARIANT (1)..(17): Xaa = Any Amino Acid
CCEYACNXPAXCTXXGA

SEQ ID NO: 11533 - protein, 17 aa, Artificial Sequence
  Synthetically generated peptide
  VARIANT (1)..(17): Xaa = Any Amino Acid
CCEYACNXPAXCTXGXA

SEQ ID NO: 11534 - protein, 16 aa, Artificial Sequence
  Synthetically generated peptide
  VARIANT (1)..(16): Xaa = Any Amino Acid
CCEYACNXPAXCTGXA

SEQ ID NO: 11535 - protein, 17 aa, Artificial Sequence
  Synthetically generated peptide
  VARIANT (1)..(17): Xaa = Any Amino Acid
CCEYACNXPAXCTGXXA

SEQ ID NO: 11536 - protein, 15 aa, Artificial Sequence
  Synthetically generated peptide
  VARIANT (1)..(15): Xaa = Any Amino Acid
CCEYACNXPACXTGA

SEQ ID NO: 11537 - protein, 16 aa, Artificial Sequence
  Synthetically generated peptide
  VARIANT (1)..(16): Xaa = Any Amino Acid
CCEYACNXPACXXTGA

SEQ ID NO: 11538 - protein, 17 aa, Artificial Sequence
  Synthetically generated peptide
  VARIANT (1)..(17): Xaa = Any Amino Acid
CCEYACNXPACXXXTGA

SEQ ID NO: 11539 - protein, 17 aa, Artificial Sequence
  Synthetically generated peptide
  VARIANT (1)..(17): Xaa = Any Amino Acid
CCEYACNXPACXXTXGA

SEQ ID NO: 11540 - protein, 17 aa, Artificial Sequence
  Synthetically generated peptide
  VARIANT (1)..(17): Xaa = Any Amino Acid
CCEYACNXPACXXTGXA

SEQ ID NO: 11541 - protein, 16 aa, Artificial Sequence
  Synthetically generated peptide
  VARIANT (1)..(16): Xaa = Any Amino Acid
CCEYACNXPACXTXGA

SEQ ID NO: 11542 - protein, 17 aa, Artificial Sequence
  Synthetically generated peptide
  VARIANT (1)..(17): Xaa = Any Amino Acid
CCEYACNXPACXTXXGA

SEQ ID NO: 11543 - protein, 17 aa, Artificial Sequence
  Synthetically generated peptide
  VARIANT (1)..(17): Xaa = Any Amino Acid
CCEYACNXPACXTXGXA

SEQ ID NO: 11544 - protein, 16 aa, Artificial Sequence
  Synthetically generated peptide
  VARIANT (1)..(16): Xaa = Any Amino Acid
CCEYACNXPACXTGXA

SEQ ID NO: 11545 - protein, 17 aa, Artificial Sequence
  Synthetically generated peptide
  VARIANT (1)..(17): Xaa = Any Amino Acid
CCEYACNXPACXTGXXA

SEQ ID NO: 11546 - protein, 15 aa, Artificial Sequence
  Synthetically generated peptide
  VARIANT (1)..(15): Xaa = Any Amino Acid
CCEYACNXPACTXGA

SEQ ID NO: 11547 - protein, 16 aa, Artificial Sequence
  Synthetically generated peptide
  VARIANT (1)..(16): Xaa = Any Amino Acid
CCEYACNXPACTXXGA

SEQ ID NO: 11548 - protein, 17 aa, Artificial Sequence
  Synthetically generated peptide
  VARIANT (1)..(17): Xaa = Any Amino Acid
CCEYACNXPACTXXXGA

SEQ ID NO: 11549 - protein, 17 aa, Artificial Sequence
  Synthetically generated peptide
  VARIANT (1)..(17): Xaa = Any Amino Acid
CCEYACNXPACTXXGXA

SEQ ID NO: 11550 - protein, 16 aa, Artificial Sequence
  Synthetically generated peptide
  VARIANT (1)..(16): Xaa = Any Amino Acid
CCEYACNXPACTXGXA

SEQ ID NO: 11551 - protein, 17 aa, Artificial Sequence
  Synthetically generated peptide
  VARIANT (1)..(17): Xaa = Any Amino Acid
CCEYACNXPACTXGXXA

SEQ ID NO: 11552 - protein, 15 aa, Artificial Sequence
  Synthetically generated peptide
  VARIANT (1)..(15): Xaa = Any Amino Acid
CCEYACNXPACTGXA

SEQ ID NO: 11553 - protein, 16 aa, Artificial Sequence
  Synthetically generated peptide
  VARIANT (1)..(16): Xaa = Any Amino Acid
CCEYACNXPACTGXXA

SEQ ID NO: 11554 - protein, 17 aa, Artificial Sequence
  Synthetically generated peptide
  VARIANT (1)..(17): Xaa = Any Amino Acid
CCEYACNXPACTGXXXA

SEQ ID NO: 11555 - protein, 14 aa, Artificial Sequence
  Synthetically generated peptide
  VARIANT (1)..(14): Xaa = Any Amino Acid
CCEYACNPXACTGA

SEQ ID NO: 11556 - protein, 15 aa, Artificial Sequence
  Synthetically generated peptide
  VARIANT (1)..(15): Xaa = Any Amino Acid
CCEYACNPXXACTGA

SEQ ID NO: 11557 - protein, 16 aa, Artificial Sequence
  Synthetically generated peptide
  VARIANT (1)..(16): Xaa = Any Amino Acid
CCEYACNPXXXACTGA

SEQ ID NO: 11558 - protein, 17 aa, Artificial Sequence
  Synthetically generated peptide
  VARIANT (1)..(17): Xaa = Any Amino Acid
CCEYACNPXXXXACTGA

SEQ ID NO: 11559 - protein, 17 aa, Artificial Sequence
  Synthetically generated peptide
  VARIANT (1)..(17): Xaa = Any Amino Acid
CCEYACNPXXXAXCTGA

SEQ ID NO: 11560 - protein, 17 aa, Artificial Sequence
  Synthetically generated peptide
  VARIANT (1)..(17): Xaa = Any Amino Acid
CCEYACNPXXXACXTGA

SEQ ID NO: 11561 - protein, 17 aa, Artificial Sequence
  Synthetically generated peptide
  VARIANT (1)..(17): Xaa = Any Amino Acid
CCEYACNPXXXACTXGA

SEQ ID NO: 11562 - protein, 17 aa, Artificial Sequence
  Synthetically generated peptide
  VARIANT (1)..(17): Xaa = Any Amino Acid
CCEYACNPXXXACTGXA

SEQ ID NO: 11563 - protein, 16 aa, Artificial Sequence
  Synthetically generated peptide
  VARIANT (1)..(16): Xaa = Any Amino Acid
CCEYACNPXXAXCTGA

SEQ ID NO: 11564 - protein, 17 aa, Artificial Sequence
  Synthetically generated peptide
  VARIANT (1)..(17): Xaa = Any Amino Acid
CCEYACNPXXAXXCTGA

SEQ ID NO: 11565 - protein, 17 aa, Artificial Sequence
  Synthetically generated peptide
  VARIANT (1)..(17): Xaa = Any Amino Acid
CCEYACNPXXAXCXTGA

SEQ ID NO: 11566 - protein, 17 aa, Artificial Sequence
  Synthetically generated peptide
  VARIANT (1)..(17): Xaa = Any Amino Acid
CCEYACNPXXAXCTXGA

SEQ ID NO: 11567 - protein, 17 aa, Artificial Sequence
  Synthetically generated peptide
  VARIANT (1)..(17): Xaa = Any Amino Acid
CCEYACNPXXAXCTGXA

SEQ ID NO: 11568 - protein, 16 aa, Artificial Sequence
  Synthetically generated peptide
  VARIANT (1)..(16): Xaa = Any Amino Acid
CCEYACNPXXACXTGA

SEQ ID NO: 11569 - protein, 17 aa, Artificial Sequence
  Synthetically generated peptide
  VARIANT (1)..(17): Xaa = Any Amino Acid
CCEYACNPXXACXXTGA

SEQ ID NO: 11570 - protein, 17 aa, Artificial Sequence
  Synthetically generated peptide
  VARIANT (1)..(17): Xaa = Any Amino Acid
CCEYACNPXXACXTXGA

SEQ ID NO: 11571 - protein, 17 aa, Artificial Sequence
  Synthetically generated peptide
  VARIANT (1)..(17): Xaa = Any Amino Acid
CCEYACNPXXACXTGXA

SEQ ID NO: 11572 - protein, 16 aa, Artificial Sequence
  Synthetically generated peptide
  VARIANT (1)..(16): Xaa = Any Amino Acid
CCEYACNPXXACTXGA

SEQ ID NO: 11573 - protein, 17 aa, Artificial Sequence
  Synthetically generated peptide
  VARIANT (1)..(17): Xaa = Any Amino Acid
CCEYACNPXXACTXXGA

SEQ ID NO: 11574 - protein, 17 aa, Artificial Sequence
  Synthetically generated peptide
  VARIANT (1)..(17): Xaa = Any Amino Acid
CCEYACNPXXACTXGXA

SEQ ID NO: 11575 - protein, 16 aa, Artificial Sequence
  Synthetically generated peptide
  VARIANT (1)..(16): Xaa = Any Amino Acid
CCEYACNPXXACTGXA

SEQ ID NO: 11576 - protein, 17 aa, Artificial Sequence
  Synthetically generated peptide
  VARIANT (1)..(17): Xaa = Any Amino Acid
CCEYACNPXXACTGXXA

SEQ ID NO: 11577 - protein, 15 aa, Artificial Sequence
  Synthetically generated peptide
  VARIANT (1)..(15): Xaa = Any Amino Acid
CCEYACNPXAXCTGA

SEQ ID NO: 11578 - protein, 16 aa, Artificial Sequence
  Synthetically generated peptide
  VARIANT (1)..(16): Xaa = Any Amino Acid
CCEYACNPXAXXCTGA

SEQ ID NO: 11579 - protein, 17 aa, Artificial Sequence
  Synthetically generated peptide
  VARIANT (1)..(17): Xaa = Any Amino Acid
CCEYACNPXAXXXCTGA

SEQ ID NO: 11580 - protein, 17 aa, Artificial Sequence
  Synthetically generated peptide
  VARIANT (1)..(17): Xaa = Any Amino Acid
CCEYACNPXAXXCXTGA

SEQ ID NO: 11581 - protein, 17 aa, Artificial Sequence
  Synthetically generated peptide
  VARIANT (1)..(17): Xaa = Any Amino Acid
CCEYACNPXAXXCTXGA

SEQ ID NO: 11582 - protein, 17 aa, Artificial Sequence
  Synthetically generated peptide
  VARIANT (1)..(17): Xaa = Any Amino Acid
CCEYACNPXAXXCTGXA

SEQ ID NO: 11583 - protein, 16 aa, Artificial Sequence
  Synthetically generated peptide
  VARIANT (1)..(16): Xaa = Any Amino Acid
CCEYACNPXAXCXTGA

SEQ ID NO: 11584 - protein, 17 aa, Artificial Sequence
  Synthetically generated peptide
  VARIANT (1)..(17): Xaa = Any Amino Acid
CCEYACNPXAXCXXTGA

SEQ ID NO: 11585 - protein, 17 aa, Artificial Sequence
  Synthetically generated peptide
  VARIANT (1)..(17): Xaa = Any Amino Acid
CCEYACNPXAXCXTXGA

SEQ ID NO: 11586 - protein, 17 aa, Artificial Sequence
  Synthetically generated peptide
  VARIANT (1)..(17): Xaa = Any Amino Acid
CCEYACNPXAXCXTGXA

SEQ ID NO: 11587 - protein, 16 aa, Artificial Sequence
  Synthetically generated peptide
  VARIANT (1)..(16): Xaa = Any Amino Acid
CCEYACNPXAXCTXGA

SEQ ID NO: 11588 - protein, 17 aa, Artificial Sequence
  Synthetically generated peptide
  VARIANT (1)..(17): Xaa = Any Amino Acid
CCEYACNPXAXCTXXGA

SEQ ID NO: 11589 - protein, 17 aa, Artificial Sequence
  Synthetically generated peptide
  VARIANT (1)..(17): Xaa = Any Amino Acid
CCEYACNPXAXCTXGXA

SEQ ID NO: 11590 - protein, 16 aa, Artificial Sequence
  Synthetically generated peptide
  VARIANT (1)..(16): Xaa = Any Amino Acid
CCEYACNPXAXCTGXA

SEQ ID NO: 11591 - protein, 17 aa, Artificial Sequence
  Synthetically generated peptide
  VARIANT (1)..(17): Xaa = Any Amino Acid
CCEYACNPXAXCTGXXA

SEQ ID NO: 11592 - protein, 15 aa, Artificial Sequence
  Synthetically generated peptide
  VARIANT (1)..(15): Xaa = Any Amino Acid
CCEYACNPXACXTGA

SEQ ID NO: 11593 - protein, 16 aa, Artificial Sequence
  Synthetically generated peptide
  VARIANT (1)..(16): Xaa = Any Amino Acid
CCEYACNPXACXXTGA

SEQ ID NO: 11594 - protein, 17 aa, Artificial Sequence
  Synthetically generated peptide
  VARIANT (1)..(17): Xaa = Any Amino Acid
CCEYACNPXACXXXTGA

SEQ ID NO: 11595 - protein, 17 aa, Artificial Sequence
  Synthetically generated peptide
  VARIANT (1)..(17): Xaa = Any Amino Acid
CCEYACNPXACXXTXGA

SEQ ID NO: 11596 - protein, 17 aa, Artificial Sequence
  Synthetically generated peptide
  VARIANT (1)..(17): Xaa = Any Amino Acid
CCEYACNPXACXXTGXA

SEQ ID NO: 11597 - protein, 16 aa, Artificial Sequence
  Synthetically generated peptide
  VARIANT (1)..(16): Xaa = Any Amino Acid
CCEYACNPXACXTXGA

SEQ ID NO: 11598 - protein, 17 aa, Artificial Sequence
  Synthetically generated peptide
  VARIANT (1)..(17): Xaa = Any Amino Acid
CCEYACNPXACXTXXGA

SEQ ID NO: 11599 - protein, 17 aa, Artificial Sequence
  Synthetically generated peptide
  VARIANT (1)..(17): Xaa = Any Amino Acid
CCEYACNPXACXTXGXA

SEQ ID NO: 11600 - protein, 16 aa, Artificial Sequence
  Synthetically generated peptide
  VARIANT (1)..(16): Xaa = Any Amino Acid
CCEYACNPXACXTGXA

SEQ ID NO: 11601 - protein, 17 aa, Artificial Sequence
  Synthetically generated peptide
  VARIANT (1)..(17): Xaa = Any Amino Acid
CCEYACNPXACXTGXXA

SEQ ID NO: 11602 - protein, 15 aa, Artificial Sequence
  Synthetically generated peptide
  VARIANT (1)..(15): Xaa = Any Amino Acid
CCEYACNPXACTXGA

SEQ ID NO: 11603 - protein, 16 aa, Artificial Sequence
  Synthetically generated peptide
  VARIANT (1)..(16): Xaa = Any Amino Acid
CCEYACNPXACTXXGA

SEQ ID NO: 11604 - protein, 17 aa, Artificial Sequence
  Synthetically generated peptide
  VARIANT (1)..(17): Xaa = Any Amino Acid
CCEYACNPXACTXXXGA

SEQ ID NO: 11605 - protein, 17 aa, Artificial Sequence
  Synthetically generated peptide
  VARIANT (1)..(17): Xaa = Any Amino Acid
CCEYACNPXACTXXGXA

SEQ ID NO: 11606 - protein, 16 aa, Artificial Sequence
  Synthetically generated peptide
  VARIANT (1)..(16): Xaa = Any Amino Acid
CCEYACNPXACTXGXA

SEQ ID NO: 11607 - protein, 17 aa, Artificial Sequence
  Synthetically generated peptide
  VARIANT (1)..(17): Xaa = Any Amino Acid
CCEYACNPXACTXGXXA

SEQ ID NO: 11608 - protein, 15 aa, Artificial Sequence
  Synthetically generated peptide
  VARIANT (1)..(15): Xaa = Any Amino Acid
CCEYACNPXACTGXA

SEQ ID NO: 11609 - protein, 16 aa, Artificial Sequence
  Synthetically generated peptide
  VARIANT (1)..(16): Xaa = Any Amino Acid
CCEYACNPXACTGXXA

SEQ ID NO: 11610 - protein, 17 aa, Artificial Sequence
  Synthetically generated peptide
  VARIANT (1)..(17): Xaa = Any Amino Acid
CCEYACNPXACTGXXXA

SEQ ID NO: 11611 - protein, 14 aa, Artificial Sequence
  Synthetically generated peptide
  VARIANT (1)..(14): Xaa = Any Amino Acid
CCEYACNPAXCTGA

SEQ ID NO: 11612 - protein, 15 aa, Artificial Sequence
  Synthetically generated peptide
  VARIANT (1)..(15): Xaa = Any Amino Acid
CCEYACNPAXXCTGA

SEQ ID NO: 11613 - protein, 16 aa, Artificial Sequence
  Synthetically generated peptide
  VARIANT (1)..(16): Xaa = Any Amino Acid
CCEYACNPAXXXCTGA

SEQ ID NO: 11614 - protein, 17 aa, Artificial Sequence
  Synthetically generated peptide
  VARIANT (1)..(17): Xaa = Any Amino Acid
CCEYACNPAXXXXCTGA

SEQ ID NO: 11615 - protein, 17 aa, Artificial Sequence
  Synthetically generated peptide
  VARIANT (1)..(17): Xaa = Any Amino Acid
CCEYACNPAXXXCXTGA

SEQ ID NO: 11616 - protein, 17 aa, Artificial Sequence
  Synthetically generated peptide
  VARIANT (1)..(17): Xaa = Any Amino Acid
CCEYACNPAXXXCTXGA

SEQ ID NO: 11617 - protein, 17 aa, Artificial Sequence
  Synthetically generated peptide
  VARIANT (1)..(17): Xaa = Any Amino Acid
CCEYACNPAXXXCTGXA

SEQ ID NO: 11618 - protein, 16 aa, Artificial Sequence
  Synthetically generated peptide
  VARIANT (1)..(16): Xaa = Any Amino Acid
CCEYACNPAXXCXTGA

SEQ ID NO: 11619 - protein, 17 aa, Artificial Sequence
  Synthetically generated peptide
  VARIANT (1)..(17): Xaa = Any Amino Acid
CCEYACNPAXXCXXTGA

SEQ ID NO: 11620 - protein, 17 aa, Artificial Sequence
  Synthetically generated peptide
  VARIANT (1)..(17): Xaa = Any Amino Acid
CCEYACNPAXXCXTXGA

SEQ ID NO: 11621 - protein, 17 aa, Artificial Sequence
  Synthetically generated peptide
  VARIANT (1)..(17): Xaa = Any Amino Acid
CCEYACNPAXXCXTGXA

SEQ ID NO: 11622 - protein, 16 aa, Artificial Sequence
  Synthetically generated peptide
  VARIANT (1)..(16): Xaa = Any Amino Acid
CCEYACNPAXXCTXGA

SEQ ID NO: 11623 - protein, 17 aa, Artificial Sequence
  Synthetically generated peptide
  VARIANT (1)..(17): Xaa = Any Amino Acid
CCEYACNPAXXCTXXGA

SEQ ID NO: 11624 - protein, 17 aa, Artificial Sequence
  Synthetically generated peptide
  VARIANT (1)..(17): Xaa = Any Amino Acid
CCEYACNPAXXCTXGXA

SEQ ID NO: 11625 - protein, 16 aa, Artificial Sequence
  Synthetically generated peptide
  VARIANT (1)..(16): Xaa = Any Amino Acid
CCEYACNPAXXCTGXA

SEQ ID NO: 11626 - protein, 17 aa, Artificial Sequence
  Synthetically generated peptide
  VARIANT (1)..(17): Xaa = Any Amino Acid
CCEYACNPAXXCTGXXA

SEQ ID NO: 11627 - protein, 15 aa, Artificial Sequence
  Synthetically generated peptide
  VARIANT (1)..(15): Xaa = Any Amino Acid
CCEYACNPAXCXTGA

SEQ ID NO: 11628 - protein, 16 aa, Artificial Sequence
  Synthetically generated peptide
  VARIANT (1)..(16): Xaa = Any Amino Acid
CCEYACNPAXCXXTGA

SEQ ID NO: 11629 - protein, 17 aa, Artificial Sequence
  Synthetically generated peptide
  VARIANT (1)..(17): Xaa = Any Amino Acid
CCEYACNPAXCXXXTGA

SEQ ID NO: 11630 - protein, 17 aa, Artificial Sequence
  Synthetically generated peptide
  VARIANT (1)..(17): Xaa = Any Amino Acid
CCEYACNPAXCXXTXGA

SEQ ID NO: 11631 - protein, 17 aa, Artificial Sequence
  Synthetically generated peptide
  VARIANT (1)..(17): Xaa = Any Amino Acid
CCEYACNPAXCXXTGXA

SEQ ID NO: 11632 - protein, 16 aa, Artificial Sequence
  Synthetically generated peptide
  VARIANT (1)..(16): Xaa = Any Amino Acid
CCEYACNPAXCXTXGA

SEQ ID NO: 11633 - protein, 17 aa, Artificial Sequence
  Synthetically generated peptide
  VARIANT (1)..(17): Xaa = Any Amino Acid
CCEYACNPAXCXTXXGA

SEQ ID NO: 11634 - protein, 17 aa, Artificial Sequence
  Synthetically generated peptide
  VARIANT (1)..(17): Xaa = Any Amino Acid
CCEYACNPAXCXTXGXA

SEQ ID NO: 11635 - protein, 16 aa, Artificial Sequence
  Synthetically generated peptide
  VARIANT (1)..(16): Xaa = Any Amino Acid
CCEYACNPAXCXTGXA

SEQ ID NO: 11636 - protein, 17 aa, Artificial Sequence
  Synthetically generated peptide
  VARIANT (1)..(17): Xaa = Any Amino Acid
CCEYACNPAXCXTGXXA

SEQ ID NO: 11637 - protein, 15 aa, Artificial Sequence
  Synthetically generated peptide
  VARIANT (1)..(15): Xaa = Any Amino Acid
CCEYACNPAXCTXGA

SEQ ID NO: 11638 - protein, 16 aa, Artificial Sequence
  Synthetically generated peptide
  VARIANT (1)..(16): Xaa = Any Amino Acid
CCEYACNPAXCTXXGA

SEQ ID NO: 11639 - protein, 17 aa, Artificial Sequence
  Synthetically generated peptide
  VARIANT (1)..(17): Xaa = Any Amino Acid
CCEYACNPAXCTXXXGA

SEQ ID NO: 11640 - protein, 17 aa, Artificial Sequence
  Synthetically generated peptide
  VARIANT (1)..(17): Xaa = Any Amino Acid
CCEYACNPAXCTXXGXA

SEQ ID NO: 11641 - protein, 16 aa, Artificial Sequence
  Synthetically generated peptide
  VARIANT (1)..(16): Xaa = Any Amino Acid
CCEYACNPAXCTXGXA

SEQ ID NO: 11642 - protein, 17 aa, Artificial Sequence
  Synthetically generated peptide
  VARIANT (1)..(17): Xaa = Any Amino Acid
CCEYACNPAXCTXGXXA

SEQ ID NO: 11643 - protein, 15 aa, Artificial Sequence
  Synthetically generated peptide
  VARIANT (1)..(15): Xaa = Any Amino Acid
CCEYACNPAXCTGXA

SEQ ID NO: 11644 - protein, 16 aa, Artificial Sequence
  Synthetically generated peptide
  VARIANT (1)..(16): Xaa = Any Amino Acid
CCEYACNPAXCTGXXA

SEQ ID NO: 11645 - protein, 17 aa, Artificial Sequence
  Synthetically generated peptide
  VARIANT (1)..(17): Xaa = Any Amino Acid
CCEYACNPAXCTGXXXA

SEQ ID NO: 11646 - protein, 14 aa, Artificial Sequence
  Synthetically generated peptide
  VARIANT (1)..(14): Xaa = Any Amino Acid
CCEYACNPACXTGA

SEQ ID NO: 11647 - protein, 15 aa, Artificial Sequence
  Synthetically generated peptide
  VARIANT (1)..(15): Xaa = Any Amino Acid
CCEYACNPACXXTGA

SEQ ID NO: 11648 - protein, 16 aa, Artificial Sequence
  Synthetically generated peptide
  VARIANT (1)..(16): Xaa = Any Amino Acid
CCEYACNPACXXXTGA

SEQ ID NO: 11649 - protein, 17 aa, Artificial Sequence
  Synthetically generated peptide
  VARIANT (1)..(17): Xaa = Any Amino Acid
CCEYACNPACXXXXTGA

SEQ ID NO: 11650 - protein, 17 aa, Artificial Sequence
  Synthetically generated peptide
  VARIANT (1)..(17): Xaa = Any Amino Acid
CCEYACNPACXXXTXGA

SEQ ID NO: 11651 - protein, 17 aa, Artificial Sequence
  Synthetically generated peptide
  VARIANT (1)..(17): Xaa = Any Amino Acid
CCEYACNPACXXXTGXA

SEQ ID NO: 11652 - protein, 16 aa, Artificial Sequence
  Synthetically generated peptide
  VARIANT (1)..(16): Xaa = Any Amino Acid
CCEYACNPACXXTXGA

SEQ ID NO: 11653 - protein, 17 aa, Artificial Sequence
  Synthetically generated peptide
  VARIANT (1)..(17): Xaa = Any Amino Acid
CCEYACNPACXXTXXGA

SEQ ID NO: 11654 - protein, 17 aa, Artificial Sequence
  Synthetically generated peptide
  VARIANT (1)..(17): Xaa = Any Amino Acid
CCEYACNPACXXTXGXA

SEQ ID NO: 11655 - protein, 16 aa, Artificial Sequence
  Synthetically generated peptide
  VARIANT (1)..(16): Xaa = Any Amino Acid
CCEYACNPACXXTGXA

SEQ ID NO: 11656 - protein, 17 aa, Artificial Sequence
  Synthetically generated peptide
  VARIANT (1)..(17): Xaa = Any Amino Acid
CCEYACNPACXXTGXXA

SEQ ID NO: 11657 - protein, 15 aa, Artificial Sequence
  Synthetically generated peptide
  VARIANT (1)..(15): Xaa = Any Amino Acid
CCEYACNPACXTXGA

SEQ ID NO: 11658 - protein, 16 aa, Artificial Sequence
  Synthetically generated peptide
  VARIANT (1)..(16): Xaa = Any Amino Acid
CCEYACNPACXTXXGA

SEQ ID NO: 11659 - protein, 17 aa, Artificial Sequence
  Synthetically generated peptide
  VARIANT (1)..(17): Xaa = Any Amino Acid
CCEYACNPACXTXXXGA

SEQ ID NO: 11660 - protein, 17 aa, Artificial Sequence
  Synthetically generated peptide
  VARIANT (1)..(17): Xaa = Any Amino Acid
CCEYACNPACXTXXGXA

SEQ ID NO: 11661 - protein, 16 aa, Artificial Sequence
  Synthetically generated peptide
  VARIANT (1)..(16): Xaa = Any Amino Acid
CCEYACNPACXTXGXA

SEQ ID NO: 11662 - protein, 17 aa, Artificial Sequence
  Synthetically generated peptide
  VARIANT (1)..(17): Xaa = Any Amino Acid
CCEYACNPACXTXGXXA

SEQ ID NO: 11663 - protein, 15 aa, Artificial Sequence
  Synthetically generated peptide
  VARIANT (1)..(15): Xaa = Any Amino Acid
CCEYACNPACXTGXA

SEQ ID NO: 11664 - protein, 16 aa, Artificial Sequence
  Synthetically generated peptide
  VARIANT (1)..(16): Xaa = Any Amino Acid
CCEYACNPACXTGXXA

SEQ ID NO: 11665 - protein, 17 aa, Artificial Sequence
  Synthetically generated peptide
  VARIANT (1)..(17): Xaa = Any Amino Acid
CCEYACNPACXTGXXXA

SEQ ID NO: 11666 - protein, 14 aa, Artificial Sequence
  Synthetically generated peptide
  VARIANT (1)..(14): Xaa = Any Amino Acid
CCEYACNPACTXGA

SEQ ID NO: 11667 - protein, 15 aa, Artificial Sequence
  Synthetically generated peptide
  VARIANT (1)..(15): Xaa = Any Amino Acid
CCEYACNPACTXXGA

SEQ ID NO: 11668 - protein, 16 aa, Artificial Sequence
  Synthetically generated peptide
  VARIANT (1)..(16): Xaa = Any Amino Acid
CCEYACNPACTXXXGA

SEQ ID NO: 11669 - protein, 17 aa, Artificial Sequence
  Synthetically generated peptide
  VARIANT (1)..(17): Xaa = Any Amino Acid
CCEYACNPACTXXXXGA

SEQ ID NO: 11670 - protein, 17 aa, Artificial Sequence
  Synthetically generated peptide
  VARIANT (1)..(17): Xaa = Any Amino Acid
CCEYACNPACTXXXGXA

SEQ ID NO: 11671 - protein, 16 aa, Artificial Sequence
  Synthetically generated peptide
  VARIANT (1)..(16): Xaa = Any Amino Acid
CCEYACNPACTXXGXA

SEQ ID NO: 11672 - protein, 17 aa, Artificial Sequence
  Synthetically generated peptide
  VARIANT (1)..(17): Xaa = Any Amino Acid
CCEYACNPACTXXGXXA

SEQ ID NO: 11673 - protein, 15 aa, Artificial Sequence
  Synthetically generated peptide
  VARIANT (1)..(15): Xaa = Any Amino Acid
CCEYACNPACTXGXA

SEQ ID NO: 11674 - protein, 16 aa, Artificial Sequence
  Synthetically generated peptide
  VARIANT (1)..(16): Xaa = Any Amino Acid
CCEYACNPACTXGXXA

SEQ ID NO: 11675 - protein, 17 aa, Artificial Sequence
  Synthetically generated peptide
  VARIANT (1)..(17): Xaa = Any Amino Acid
CCEYACNPACTXGXXXA

SEQ ID NO: 11676 - protein, 14 aa, Artificial Sequence
  Synthetically generated peptide
  VARIANT (1)..(14): Xaa = Any Amino Acid
CCEYACNPACTGXA

SEQ ID NO: 11677 - protein, 15 aa, Artificial Sequence
  Synthetically generated peptide
  VARIANT (1)..(15): Xaa = Any Amino Acid
CCEYACNPACTGXXA

SEQ ID NO: 11678 - protein, 16 aa, Artificial Sequence
  Synthetically generated peptide
  VARIANT (1)..(16): Xaa = Any Amino Acid
CCEYACNPACTGXXXA

SEQ ID NO: 11679 - protein, 17 aa, Artificial Sequence
  Synthetically generated peptide
  VARIANT (1)..(17): Xaa = Any Amino Acid
CCEYACNPACTGXXXXA

SEQ ID NO: 11680 - protein, 14 aa, Artificial Sequence
  Synthetically generated peptide
  VARIANT (1)..(14): Xaa = Any Amino Acid
ACXEFCANPACTGC

SEQ ID NO: 11681 - protein, 15 aa, Artificial Sequence
  Synthetically generated peptide
  VARIANT (1)..(15): Xaa = Any Amino Acid
ACXXEFCANPACTGC

SEQ ID NO: 11682 - protein, 16 aa, Artificial Sequence
  Synthetically generated peptide
  VARIANT (1)..(16): Xaa = Any Amino Acid
ACXXXEFCANPACTGC

SEQ ID NO: 11683 - protein, 17 aa, Artificial Sequence
  Synthetically generated peptide
  VARIANT (1)..(17): Xaa = Any Amino Acid
ACXXXXEFCANPACTGC

SEQ ID NO: 11684 - protein, 17 aa, Artificial Sequence
  Synthetically generated peptide
  VARIANT (1)..(17): Xaa = Any Amino Acid
ACXXXEXFCANPACTGC

SEQ ID NO: 11685 - protein, 17 aa, Artificial Sequence
  Synthetically generated peptide
  VARIANT (1)..(17): Xaa = Any Amino Acid
ACXXXEFXCANPACTGC

SEQ ID NO: 11686 - protein, 17 aa, Artificial Sequence
  Synthetically generated peptide
  VARIANT (1)..(17): Xaa = Any Amino Acid
ACXXXEFCAXNPACTGC

SEQ ID NO: 11687 - protein, 17 aa, Artificial Sequence
  Synthetically generated peptide
  VARIANT (1)..(17): Xaa = Any Amino Acid
ACXXXEFCANXPACTGC

SEQ ID NO: 11688 - protein, 17 aa, Artificial Sequence
  Synthetically generated peptide
  VARIANT (1)..(17): Xaa = Any Amino Acid
ACXXXEFCANPXACTGC

SEQ ID NO: 11689 - protein, 17 aa, Artificial Sequence
  Synthetically generated peptide
  VARIANT (1)..(17): Xaa = Any Amino Acid
ACXXXEFCANPAXCTGC

SEQ ID NO: 11690 - protein, 17 aa, Artificial Sequence
  Synthetically generated peptide
  VARIANT (1)..(17): Xaa = Any Amino Acid
ACXXXEFCANPACXTGC

SEQ ID NO: 11691 - protein, 17 aa, Artificial Sequence
  Synthetically generated peptide
  VARIANT (1)..(17): Xaa = Any Amino Acid
ACXXXEFCANPACTXGC

SEQ ID NO: 11692 - protein, 17 aa, Artificial Sequence
  Synthetically generated peptide
  VARIANT (1)..(17): Xaa = Any Amino Acid
ACXXXEFCANPACTGXC

SEQ ID NO: 11693 - protein, 16 aa, Artificial Sequence
  Synthetically generated peptide
  VARIANT (1)..(16): Xaa = Any Amino Acid
ACXXEXFCANPACTGC

SEQ ID NO: 11694 - protein, 17 aa, Artificial Sequence
  Synthetically generated peptide
  VARIANT (1)..(17): Xaa = Any Amino Acid
ACXXEXXFCANPACTGC

SEQ ID NO: 11695 - protein, 17 aa, Artificial Sequence
  Synthetically generated peptide
  VARIANT (1)..(17): Xaa = Any Amino Acid
ACXXEXFXCANPACTGC

SEQ ID NO: 11696 - protein, 17 aa, Artificial Sequence
  Synthetically generated peptide
  VARIANT (1)..(17): Xaa = Any Amino Acid
ACXXEXFCAXNPACTGC

SEQ ID NO: 11697 - protein, 17 aa, Artificial Sequence
  Synthetically generated peptide
  VARIANT (1)..(17): Xaa = Any Amino Acid
ACXXEXFCANXPACTGC

SEQ ID NO: 11698 - protein, 17 aa, Artificial Sequence
  Synthetically generated peptide
  VARIANT (1)..(17): Xaa = Any Amino Acid
ACXXEXFCANPXACTGC

SEQ ID NO: 11699 - protein, 17 aa, Artificial Sequence
  Synthetically generated peptide
  VARIANT (1)..(17): Xaa = Any Amino Acid
ACXXEXFCANPAXCTGC

SEQ ID NO: 11700 - protein, 17 aa, Artificial Sequence
  Synthetically generated peptide
  VARIANT (1)..(17): Xaa = Any Amino Acid
ACXXEXFCANPACXTGC

SEQ ID NO: 11701 - protein, 17 aa, Artificial Sequence
  Synthetically generated peptide
  VARIANT (1)..(17): Xaa = Any Amino Acid
ACXXEXFCANPACTXGC

SEQ ID NO: 11702 - protein, 17 aa, Artificial Sequence
  Synthetically generated peptide
  VARIANT (1)..(17): Xaa = Any Amino Acid
ACXXEXFCANPACTGXC

SEQ ID NO: 11703 - protein, 16 aa, Artificial Sequence
  Synthetically generated peptide
  VARIANT (1)..(16): Xaa = Any Amino Acid
ACXXEFXCANPACTGC

SEQ ID NO: 11704 - protein, 17 aa, Artificial Sequence
  Synthetically generated peptide
  VARIANT (1)..(17): Xaa = Any Amino Acid
ACXXEFXXCANPACTGC

SEQ ID NO: 11705 - protein, 17 aa, Artificial Sequence
  Synthetically generated peptide
  VARIANT (1)..(17): Xaa = Any Amino Acid
ACXXEFXCAXNPACTGC

SEQ ID NO: 11706 - protein, 17 aa, Artificial Sequence
  Synthetically generated peptide
  VARIANT (1)..(17): Xaa = Any Amino Acid
ACXXEFXCANXPACTGC

SEQ ID NO: 11707 - protein, 17 aa, Artificial Sequence
  Synthetically generated peptide
  VARIANT (1)..(17): Xaa = Any Amino Acid
ACXXEFXCANPXACTGC

SEQ ID NO: 11708 - protein, 17 aa, Artificial Sequence
  Synthetically generated peptide
  VARIANT (1)..(17): Xaa = Any Amino Acid
ACXXEFXCANPAXCTGC

SEQ ID NO: 11709 - protein, 17 aa, Artificial Sequence
  Synthetically generated peptide
  VARIANT (1)..(17): Xaa = Any Amino Acid
ACXXEFXCANPACXTGC

SEQ ID NO: 11710 - protein, 17 aa, Artificial Sequence
  Synthetically generated peptide
  VARIANT (1)..(17): Xaa = Any Amino Acid
ACXXEFXCANPACTXGC

SEQ ID NO: 11711 - protein, 17 aa, Artificial Sequence
  Synthetically generated peptide
  VARIANT (1)..(17): Xaa = Any Amino Acid
ACXXEFXCANPACTGXC

SEQ ID NO: 11712 - protein, 16 aa, Artificial Sequence
  Synthetically generated peptide
  VARIANT (1)..(16): Xaa = Any Amino Acid
ACXXEFCAXNPACTGC

SEQ ID NO: 11713 - protein, 17 aa, Artificial Sequence
  Synthetically generated peptide
  VARIANT (1)..(17): Xaa = Any Amino Acid
ACXXEFCAXXNPACTGC

SEQ ID NO: 11714 - protein, 17 aa, Artificial Sequence
  Synthetically generated peptide
  VARIANT (1)..(17): Xaa = Any Amino Acid
ACXXEFCAXNXPACTGC

SEQ ID NO: 11715 - protein, 17 aa, Artificial Sequence
  Synthetically generated peptide
  VARIANT (1)..(17): Xaa = Any Amino Acid
ACXXEFCAXNPXACTGC

SEQ ID NO: 11716 - protein, 17 aa, Artificial Sequence
  Synthetically generated peptide
  VARIANT (1)..(17): Xaa = Any Amino Acid
ACXXEFCAXNPAXCTGC

SEQ ID NO: 11717 - protein, 17 aa, Artificial Sequence
  Synthetically generated peptide
  VARIANT (1)..(17): Xaa = Any Amino Acid
ACXXEFCAXNPACXTGC

SEQ ID NO: 11718 - protein, 17 aa, Artificial Sequence
  Synthetically generated peptide
  VARIANT (1)..(17): Xaa = Any Amino Acid
ACXXEFCAXNPACTXGC

SEQ ID NO: 11719 - protein, 17 aa, Artificial Sequence
  Synthetically generated peptide
  VARIANT (1)..(17): Xaa = Any Amino Acid
ACXXEFCAXNPACTGXC

SEQ ID NO: 11720 - protein, 16 aa, Artificial Sequence
  Synthetically generated peptide
  VARIANT (1)..(16): Xaa = Any Amino Acid
ACXXEFCANXPACTGC

SEQ ID NO: 11721 - protein, 17 aa, Artificial Sequence
  Synthetically generated peptide
  VARIANT (1)..(17): Xaa = Any Amino Acid
ACXXEFCANXXPACTGC

SEQ ID NO: 11722 - protein, 17 aa, Artificial Sequence
  Synthetically generated peptide
  VARIANT (1)..(17): Xaa = Any Amino Acid
ACXXEFCANXPXACTGC

SEQ ID NO: 11723 - protein, 17 aa, Artificial Sequence
  Synthetically generated peptide
  VARIANT (1)..(17): Xaa = Any Amino Acid
ACXXEFCANXPAXCTGC

SEQ ID NO: 11724 - protein, 17 aa, Artificial Sequence
  Synthetically generated peptide
  VARIANT (1)..(17): Xaa = Any Amino Acid
ACXXEFCANXPACXTGC

SEQ ID NO: 11725 - protein, 17 aa, Artificial Sequence
  Synthetically generated peptide
  VARIANT (1)..(17): Xaa = Any Amino Acid
ACXXEFCANXPACTXGC

SEQ ID NO: 11726 - protein, 17 aa, Artificial Sequence
  Synthetically generated peptide
  VARIANT (1)..(17): Xaa = Any Amino Acid
ACXXEFCANXPACTGXC

SEQ ID NO: 11727 - protein, 16 aa, Artificial Sequence
  Synthetically generated peptide
  VARIANT (1)..(16): Xaa = Any Amino Acid
ACXXEFCANPXACTGC

SEQ ID NO: 11728 - protein, 17 aa, Artificial Sequence
  Synthetically generated peptide
  VARIANT (1)..(17): Xaa = Any Amino Acid
ACXXEFCANPXXACTGC

SEQ ID NO: 11729 - protein, 17 aa, Artificial Sequence
  Synthetically generated peptide
  VARIANT (1)..(17): Xaa = Any Amino Acid
ACXXEFCANPXAXCTGC

SEQ ID NO: 11730 - protein, 17 aa, Artificial Sequence
  Synthetically generated peptide
  VARIANT (1)..(17): Xaa = Any Amino Acid
ACXXEFCANPXACXTGC

SEQ ID NO: 11731 - protein, 17 aa, Artificial Sequence
  Synthetically generated peptide
  VARIANT (1)..(17): Xaa = Any Amino Acid
ACXXEFCANPXACTXGC

SEQ ID NO: 11732 - protein, 17 aa, Artificial Sequence
  Synthetically generated peptide
  VARIANT (1)..(17): Xaa = Any Amino Acid
ACXXEFCANPXACTGXC

SEQ ID NO: 11733 - protein, 16 aa, Artificial Sequence
  Synthetically generated peptide
  VARIANT (1)..(16): Xaa = Any Amino Acid
ACXXEFCANPAXCTGC

SEQ ID NO: 11734 - protein, 17 aa, Artificial Sequence
  Synthetically generated peptide
  VARIANT (1)..(17): Xaa = Any Amino Acid
ACXXEFCANPAXXCTGC

SEQ ID NO: 11735 - protein, 17 aa, Artificial Sequence
  Synthetically generated peptide
  VARIANT (1)..(17): Xaa = Any Amino Acid
ACXXEFCANPAXCXTGC

SEQ ID NO: 11736 - protein, 17 aa, Artificial Sequence
  Synthetically generated peptide
  VARIANT (1)..(17): Xaa = Any Amino Acid
ACXXEFCANPAXCTXGC

SEQ ID NO: 11737 - protein, 17 aa, Artificial Sequence
  Synthetically generated peptide
  VARIANT (1)..(17): Xaa = Any Amino Acid
ACXXEFCANPAXCTGXC

SEQ ID NO: 11738 - protein, 16 aa, Artificial Sequence
  Synthetically generated peptide
  VARIANT (1)..(16): Xaa = Any Amino Acid
ACXXEFCANPACXTGC

SEQ ID NO: 11739 - protein, 17 aa, Artificial Sequence
  Synthetically generated peptide
  VARIANT (1)..(17): Xaa = Any Amino Acid
ACXXEFCANPACXXTGC

SEQ ID NO: 11740 - protein, 17 aa, Artificial Sequence
  Synthetically generated peptide
  VARIANT (1)..(17): Xaa = Any Amino Acid
ACXXEFCANPACXTXGC

SEQ ID NO: 11741 - protein, 17 aa, Artificial Sequence
  Synthetically generated peptide
  VARIANT (1)..(17): Xaa = Any Amino Acid
ACXXEFCANPACXTGXC

SEQ ID NO: 11742 - protein, 16 aa, Artificial Sequence
  Synthetically generated peptide
  VARIANT (1)..(16): Xaa = Any Amino Acid
ACXXEFCANPACTXGC

SEQ ID NO: 11743 - protein, 17 aa, Artificial Sequence
  Synthetically generated peptide
  VARIANT (1)..(17): Xaa = Any Amino Acid
ACXXEFCANPACTXXGC

SEQ ID NO: 11744 - protein, 17 aa, Artificial Sequence
  Synthetically generated peptide
  VARIANT (1)..(17): Xaa = Any Amino Acid
ACXXEFCANPACTXGXC

SEQ ID NO: 11745 - protein, 16 aa, Artificial Sequence
  Synthetically generated peptide
  VARIANT (1)..(16): Xaa = Any Amino Acid
ACXXEFCANPACTGXC

SEQ ID NO: 11746 - protein, 17 aa, Artificial Sequence
  Synthetically generated peptide
  VARIANT (1)..(17): Xaa = Any Amino Acid
ACXXEFCANPACTGXXC

SEQ ID NO: 11747 - protein, 15 aa, Artificial Sequence
  Synthetically generated peptide
  VARIANT (1)..(15): Xaa = Any Amino Acid
ACXEXFCANPACTGC

SEQ ID NO: 11748 - protein, 16 aa, Artificial Sequence
  Synthetically generated peptide
  VARIANT (1)..(16): Xaa = Any Amino Acid
ACXEXXFCANPACTGC

SEQ ID NO: 11749 - protein, 17 aa, Artificial Sequence
  Synthetically generated peptide
  VARIANT (1)..(17): Xaa = Any Amino Acid
ACXEXXXFCANPACTGC

SEQ ID NO: 11750 - protein, 17 aa, Artificial Sequence
  Synthetically generated peptide
  VARIANT (1)..(17): Xaa = Any Amino Acid
ACXEXXFXCANPACTGC

SEQ ID NO: 11751 - protein, 17 aa, Artificial Sequence
  Synthetically generated peptide
  VARIANT (1)..(17): Xaa = Any Amino Acid
ACXEXXFCAXNPACTGC

SEQ ID NO: 11752 - protein, 17 aa, Artificial Sequence
  Synthetically generated peptide
  VARIANT (1)..(17): Xaa = Any Amino Acid
ACXEXXFCANXPACTGC

SEQ ID NO: 11753 - protein, 17 aa, Artificial Sequence
  Synthetically generated peptide
  VARIANT (1)..(17): Xaa = Any Amino Acid
ACXEXXFCANPXACTGC

SEQ ID NO: 11754 - protein, 17 aa, Artificial Sequence
  Synthetically generated peptide
  VARIANT (1)..(17): Xaa = Any Amino Acid
ACXEXXFCANPAXCTGC

SEQ ID NO: 11755 - protein, 17 aa, Artificial Sequence
  Synthetically generated peptide
  VARIANT (1)..(17): Xaa = Any Amino Acid
ACXEXXFCANPACXTGC

SEQ ID NO: 11756 - protein, 17 aa, Artificial Sequence
  Synthetically generated peptide
  VARIANT (1)..(17): Xaa = Any Amino Acid
ACXEXXFCANPACTXGC

SEQ ID NO: 11757 - protein, 17 aa, Artificial Sequence
  Synthetically generated peptide
  VARIANT (1)..(17): Xaa = Any Amino Acid
ACXEXXFCANPACTGXC

SEQ ID NO: 11758 - protein, 16 aa, Artificial Sequence
  Synthetically generated peptide
  VARIANT (1)..(16): Xaa = Any Amino Acid
ACXEXFXCANPACTGC

SEQ ID NO: 11759 - protein, 17 aa, Artificial Sequence
  Synthetically generated peptide
  VARIANT (1)..(17): Xaa = Any Amino Acid
ACXEXFXXCANPACTGC

SEQ ID NO: 11760 - protein, 17 aa, Artificial Sequence
  Synthetically generated peptide
  VARIANT (1)..(17): Xaa = Any Amino Acid
ACXEXFXCAXNPACTGC

SEQ ID NO: 11761 - protein, 17 aa, Artificial Sequence
  Synthetically generated peptide
  VARIANT (1)..(17): Xaa = Any Amino Acid
ACXEXFXCANXPACTGC

SEQ ID NO: 11762 - protein, 17 aa, Artificial Sequence
  Synthetically generated peptide
  VARIANT (1)..(17): Xaa = Any Amino Acid
ACXEXFXCANPXACTGC

SEQ ID NO: 11763 - protein, 17 aa, Artificial Sequence
  Synthetically generated peptide
  VARIANT (1)..(17): Xaa = Any Amino Acid
ACXEXFXCANPAXCTGC

SEQ ID NO: 11764 - protein, 17 aa, Artificial Sequence
  Synthetically generated peptide
  VARIANT (1)..(17): Xaa = Any Amino Acid
ACXEXFXCANPACXTGC

SEQ ID NO: 11765 - protein, 17 aa, Artificial Sequence
  Synthetically generated peptide
  VARIANT (1)..(17): Xaa = Any Amino Acid
ACXEXFXCANPACTXGC

SEQ ID NO: 11766 - protein, 17 aa, Artificial Sequence
  Synthetically generated peptide
  VARIANT (1)..(17): Xaa = Any Amino Acid
ACXEXFXCANPACTGXC

SEQ ID NO: 11767 - protein, 16 aa, Artificial Sequence
  Synthetically generated peptide
  VARIANT (1)..(16): Xaa = Any Amino Acid
ACXEXFCAXNPACTGC

SEQ ID NO: 11768 - protein, 17 aa, Artificial Sequence
  Synthetically generated peptide
  VARIANT (1)..(17): Xaa = Any Amino Acid
ACXEXFCAXXNPACTGC

SEQ ID NO: 11769 - protein, 17 aa, Artificial Sequence
  Synthetically generated peptide
  VARIANT (1)..(17): Xaa = Any Amino Acid
ACXEXFCAXNXPACTGC

SEQ ID NO: 11770 - protein, 17 aa, Artificial Sequence
  Synthetically generated peptide
  VARIANT (1)..(17): Xaa = Any Amino Acid
ACXEXFCAXNPXACTGC

SEQ ID NO: 11771 - protein, 17 aa, Artificial Sequence
  Synthetically generated peptide
  VARIANT (1)..(17): Xaa = Any Amino Acid
ACXEXFCAXNPAXCTGC

SEQ ID NO: 11772 - protein, 17 aa, Artificial Sequence
  Synthetically generated peptide
  VARIANT (1)..(17): Xaa = Any Amino Acid
ACXEXFCAXNPACXTGC

SEQ ID NO: 11773 - protein, 17 aa, Artificial Sequence
  Synthetically generated peptide
  VARIANT (1)..(17): Xaa = Any Amino Acid
ACXEXFCAXNPACTXGC

SEQ ID NO: 11774 - protein, 17 aa, Artificial Sequence
  Synthetically generated peptide
  VARIANT (1)..(17): Xaa = Any Amino Acid
ACXEXFCAXNPACTGXC

SEQ ID NO: 11775 - protein, 16 aa, Artificial Sequence
  Synthetically generated peptide
  VARIANT (1)..(16): Xaa = Any Amino Acid
ACXEXFCANXPACTGC

SEQ ID NO: 11776 - protein, 17 aa, Artificial Sequence
  Synthetically generated peptide
  VARIANT (1)..(17): Xaa = Any Amino Acid
ACXEXFCANXXPACTGC

SEQ ID NO: 11777 - protein, 17 aa, Artificial Sequence
  Synthetically generated peptide
  VARIANT (1)..(17): Xaa = Any Amino Acid
ACXEXFCANXPXACTGC

SEQ ID NO: 11778 - protein, 17 aa, Artificial Sequence
  Synthetically generated peptide
  VARIANT (1)..(17): Xaa = Any Amino Acid
ACXEXFCANXPAXCTGC

SEQ ID NO: 11779 - protein, 17 aa, Artificial Sequence
  Synthetically generated peptide
  VARIANT (1)..(17): Xaa = Any Amino Acid
ACXEXFCANXPACXTGC

SEQ ID NO: 11780 - protein, 17 aa, Artificial Sequence
  Synthetically generated peptide
  VARIANT (1)..(17): Xaa = Any Amino Acid
ACXEXFCANXPACTXGC

SEQ ID NO: 11781 - protein, 17 aa, Artificial Sequence
  Synthetically generated peptide
  VARIANT (1)..(17): Xaa = Any Amino Acid
ACXEXFCANXPACTGXC

SEQ ID NO: 11782 - protein, 16 aa, Artificial Sequence
  Synthetically generated peptide
  VARIANT (1)..(16): Xaa = Any Amino Acid
ACXEXFCANPXACTGC

SEQ ID NO: 11783 - protein, 17 aa, Artificial Sequence
  Synthetically generated peptide
  VARIANT (1)..(17): Xaa = Any Amino Acid
ACXEXFCANPXXACTGC

SEQ ID NO: 11784 - protein, 17 aa, Artificial Sequence
  Synthetically generated peptide
  VARIANT (1)..(17): Xaa = Any Amino Acid
ACXEXFCANPXAXCTGC

SEQ ID NO: 11785 - protein, 17 aa, Artificial Sequence
  Synthetically generated peptide
  VARIANT (1)..(17): Xaa = Any Amino Acid
ACXEXFCANPXACXTGC

SEQ ID NO: 11786 - protein, 17 aa, Artificial Sequence
  Synthetically generated peptide
  VARIANT (1)..(17): Xaa = Any Amino Acid
ACXEXFCANPXACTXGC

SEQ ID NO: 11787 - protein, 17 aa, Artificial Sequence
  Synthetically generated peptide
  VARIANT (1)..(17): Xaa = Any Amino Acid
ACXEXFCANPXACTGXC

SEQ ID NO: 11788 - protein, 16 aa, Artificial Sequence
  Synthetically generated peptide
  VARIANT (1)..(16): Xaa = Any Amino Acid
ACXEXFCANPAXCTGC

SEQ ID NO: 11789 - protein, 17 aa, Artificial Sequence
  Synthetically generated peptide
  VARIANT (1)..(17): Xaa = Any Amino Acid
ACXEXFCANPAXXCTGC

SEQ ID NO: 11790 - protein, 17 aa, Artificial Sequence
  Synthetically generated peptide
  VARIANT (1)..(17): Xaa = Any Amino Acid
ACXEXFCANPAXCXTGC

SEQ ID NO: 11791 - protein, 17 aa, Artificial Sequence
  Synthetically generated peptide
  VARIANT (1)..(17): Xaa = Any Amino Acid
ACXEXFCANPAXCTXGC

SEQ ID NO: 11792 - protein, 17 aa, Artificial Sequence
  Synthetically generated peptide
  VARIANT (1)..(17): Xaa = Any Amino Acid
ACXEXFCANPAXCTGXC

SEQ ID NO: 11793 - protein, 16 aa, Artificial Sequence
  Synthetically generated peptide
  VARIANT (1)..(16): Xaa = Any Amino Acid
ACXEXFCANPACXTGC

SEQ ID NO: 11794 - protein, 17 aa, Artificial Sequence
  Synthetically generated peptide
  VARIANT (1)..(17): Xaa = Any Amino Acid
ACXEXFCANPACXXTGC

SEQ ID NO: 11795 - protein, 17 aa, Artificial Sequence
  Synthetically generated peptide
  VARIANT (1)..(17): Xaa = Any Amino Acid
ACXEXFCANPACXTXGC

SEQ ID NO: 11796 - protein, 17 aa, Artificial Sequence
  Synthetically generated peptide
  VARIANT (1)..(17): Xaa = Any Amino Acid
ACXEXFCANPACXTGXC

SEQ ID NO: 11797 - protein, 16 aa, Artificial Sequence
  Synthetically generated peptide
  VARIANT (1)..(16): Xaa = Any Amino Acid
ACXEXFCANPACTXGC

SEQ ID NO: 11798 - protein, 17 aa, Artificial Sequence
  Synthetically generated peptide
  VARIANT (1)..(17): Xaa = Any Amino Acid
ACXEXFCANPACTXXGC

SEQ ID NO: 11799 - protein, 17 aa, Artificial Sequence
  Synthetically generated peptide
  VARIANT (1)..(17): Xaa = Any Amino Acid
ACXEXFCANPACTXGXC

SEQ ID NO: 11800 - protein, 16 aa, Artificial Sequence
  Synthetically generated peptide
  VARIANT (1)..(16): Xaa = Any Amino Acid
ACXEXFCANPACTGXC

SEQ ID NO: 11801 - protein, 17 aa, Artificial Sequence
  Synthetically generated peptide
  VARIANT (1)..(17): Xaa = Any Amino Acid
ACXEXFCANPACTGXXC

SEQ ID NO: 11802 - protein, 15 aa, Artificial Sequence
  Synthetically generated peptide
  VARIANT (1)..(15): Xaa = Any Amino Acid
ACXEFXCANPACTGC

SEQ ID NO: 11803 - protein, 16 aa, Artificial Sequence
  Synthetically generated peptide
  VARIANT (1)..(16): Xaa = Any Amino Acid
ACXEFXXCANPACTGC

SEQ ID NO: 11804 - protein, 17 aa, Artificial Sequence
  Synthetically generated peptide
  VARIANT (1)..(17): Xaa = Any Amino Acid
ACXEFXXXCANPACTGC

SEQ ID NO: 11805 - protein, 17 aa, Artificial Sequence
  Synthetically generated peptide
  VARIANT (1)..(17): Xaa = Any Amino Acid
ACXEFXXCAXNPACTGC

SEQ ID NO: 11806 - protein, 17 aa, Artificial Sequence
  Synthetically generated peptide
  VARIANT (1)..(17): Xaa = Any Amino Acid
ACXEFXXCANXPACTGC

SEQ ID NO: 11807 - protein, 17 aa, Artificial Sequence
  Synthetically generated peptide
  VARIANT (1)..(17): Xaa = Any Amino Acid
ACXEFXXCANPXACTGC

SEQ ID NO: 11808 - protein, 17 aa, Artificial Sequence
  Synthetically generated peptide
  VARIANT (1)..(17): Xaa = Any Amino Acid
ACXEFXXCANPAXCTGC

SEQ ID NO: 11809 - protein, 17 aa, Artificial Sequence
  Synthetically generated peptide
  VARIANT (1)..(17): Xaa = Any Amino Acid
ACXEFXXCANPACXTGC

SEQ ID NO: 11810 - protein, 17 aa, Artificial Sequence
  Synthetically generated peptide
  VARIANT (1)..(17): Xaa = Any Amino Acid
ACXEFXXCANPACTXGC

SEQ ID NO: 11811 - protein, 17 aa, Artificial Sequence
  Synthetically generated peptide
  VARIANT (1)..(17): Xaa = Any Amino Acid
ACXEFXXCANPACTGXC

SEQ ID NO: 11812 - protein, 16 aa, Artificial Sequence
  Synthetically generated peptide
  VARIANT (1)..(16): Xaa = Any Amino Acid
ACXEFXCAXNPACTGC

SEQ ID NO: 11813 - protein, 17 aa, Artificial Sequence
  Synthetically generated peptide
  VARIANT (1)..(17): Xaa = Any Amino Acid
ACXEFXCAXXNPACTGC

SEQ ID NO: 11814 - protein, 17 aa, Artificial Sequence
  Synthetically generated peptide
  VARIANT (1)..(17): Xaa = Any Amino Acid
ACXEFXCAXNXPACTGC

SEQ ID NO: 11815 - protein, 17 aa, Artificial Sequence
  Synthetically generated peptide
  VARIANT (1)..(17): Xaa = Any Amino Acid
ACXEFXCAXNPXACTGC

SEQ ID NO: 11816 - protein, 17 aa, Artificial Sequence
  Synthetically generated peptide
  VARIANT (1)..(17): Xaa = Any Amino Acid
ACXEFXCAXNPAXCTGC

SEQ ID NO: 11817 - protein, 17 aa, Artificial Sequence
  Synthetically generated peptide
  VARIANT (1)..(17): Xaa = Any Amino Acid
ACXEFXCAXNPACXTGC

SEQ ID NO: 11818 - protein, 17 aa, Artificial Sequence
  Synthetically generated peptide
  VARIANT (1)..(17): Xaa = Any Amino Acid
ACXEFXCAXNPACTXGC

SEQ ID NO: 11819 - protein, 17 aa, Artificial Sequence
  Synthetically generated peptide
  VARIANT (1)..(17): Xaa = Any Amino Acid
ACXEFXCAXNPACTGXC

SEQ ID NO: 11820 - protein, 16 aa, Artificial Sequence
  Synthetically generated peptide
  VARIANT (1)..(16): Xaa = Any Amino Acid
ACXEFXCANXPACTGC

SEQ ID NO: 11821 - protein, 17 aa, Artificial Sequence
  Synthetically generated peptide
  VARIANT (1)..(17): Xaa = Any Amino Acid
ACXEFXCANXXPACTGC

SEQ ID NO: 11822 - protein, 17 aa, Artificial Sequence
  Synthetically generated peptide
  VARIANT (1)..(17): Xaa = Any Amino Acid
ACXEFXCANXPXACTGC

SEQ ID NO: 11823 - protein, 17 aa, Artificial Sequence
  Synthetically generated peptide
  VARIANT (1)..(17): Xaa = Any Amino Acid
ACXEFXCANXPAXCTGC

SEQ ID NO: 11824 - protein, 17 aa, Artificial Sequence
  Synthetically generated peptide
  VARIANT (1)..(17): Xaa = Any Amino Acid
ACXEFXCANXPACXTGC

SEQ ID NO: 11825 - protein, 17 aa, Artificial Sequence
  Synthetically generated peptide
  VARIANT (1)..(17): Xaa = Any Amino Acid
ACXEFXCANXPACTXGC

SEQ ID NO: 11826 - protein, 17 aa, Artificial Sequence
  Synthetically generated peptide
  VARIANT (1)..(17): Xaa = Any Amino Acid
ACXEFXCANXPACTGXC

SEQ ID NO: 11827 - protein, 16 aa, Artificial Sequence
  Synthetically generated peptide
  VARIANT (1)..(16): Xaa = Any Amino Acid
ACXEFXCANPXACTGC

SEQ ID NO: 11828 - protein, 17 aa, Artificial Sequence
  Synthetically generated peptide
  VARIANT (1)..(17): Xaa = Any Amino Acid
ACXEFXCANPXXACTGC

SEQ ID NO: 11829 - protein, 17 aa, Artificial Sequence
  Synthetically generated peptide
  VARIANT (1)..(17): Xaa = Any Amino Acid
ACXEFXCANPXAXCTGC

SEQ ID NO: 11830 - protein, 17 aa, Artificial Sequence
  Synthetically generated peptide
  VARIANT (1)..(17): Xaa = Any Amino Acid
ACXEFXCANPXACXTGC

SEQ ID NO: 11831 - protein, 17 aa, Artificial Sequence
  Synthetically generated peptide
  VARIANT (1)..(17): Xaa = Any Amino Acid
ACXEFXCANPXACTXGC

SEQ ID NO: 11832 - protein, 17 aa, Artificial Sequence
  Synthetically generated peptide
  VARIANT (1)..(17): Xaa = Any Amino Acid
ACXEFXCANPXACTGXC

SEQ ID NO: 11833 - protein, 16 aa, Artificial Sequence
  Synthetically generated peptide
  VARIANT (1)..(16): Xaa = Any Amino Acid
ACXEFXCANPAXCTGC

SEQ ID NO: 11834 - protein, 17 aa, Artificial Sequence
  Synthetically generated peptide
  VARIANT (1)..(17): Xaa = Any Amino Acid
ACXEFXCANPAXXCTGC

SEQ ID NO: 11835 - protein, 17 aa, Artificial Sequence
  Synthetically generated peptide
  VARIANT (1)..(17): Xaa = Any Amino Acid
ACXEFXCANPAXCXTGC

SEQ ID NO: 11836 - protein, 17 aa, Artificial Sequence
  Synthetically generated peptide
  VARIANT (1)..(17): Xaa = Any Amino Acid
ACXEFXCANPAXCTXGC

SEQ ID NO: 11837 - protein, 17 aa, Artificial Sequence
  Synthetically generated peptide
  VARIANT (1)..(17): Xaa = Any Amino Acid
ACXEFXCANPAXCTGXC

SEQ ID NO: 11838 - protein, 16 aa, Artificial Sequence
  Synthetically generated peptide
  VARIANT (1)..(16): Xaa = Any Amino Acid
ACXEFXCANPACXTGC

SEQ ID NO: 11839 - protein, 17 aa, Artificial Sequence
  Synthetically generated peptide
  VARIANT (1)..(17): Xaa = Any Amino Acid
ACXEFXCANPACXXTGC

SEQ ID NO: 11840 - protein, 17 aa, Artificial Sequence
  Synthetically generated peptide
  VARIANT (1)..(17): Xaa = Any Amino Acid
ACXEFXCANPACXTXGC

SEQ ID NO: 11841 - protein, 17 aa, Artificial Sequence
  Synthetically generated peptide
  VARIANT (1)..(17): Xaa = Any Amino Acid
ACXEFXCANPACXTGXC

SEQ ID NO: 11842 - protein, 16 aa, Artificial Sequence
  Synthetically generated peptide
  VARIANT (1)..(16): Xaa = Any Amino Acid
ACXEFXCANPACTXGC

SEQ ID NO: 11843 - protein, 17 aa, Artificial Sequence
  Synthetically generated peptide
  VARIANT (1)..(17): Xaa = Any Amino Acid
ACXEFXCANPACTXXGC

SEQ ID NO: 11844 - protein, 17 aa, Artificial Sequence
  Synthetically generated peptide
  VARIANT (1)..(17): Xaa = Any Amino Acid
ACXEFXCANPACTXGXC

SEQ ID NO: 11845 - protein, 16 aa, Artificial Sequence
  Synthetically generated peptide
  VARIANT (1)..(16): Xaa = Any Amino Acid
ACXEFXCANPACTGXC

SEQ ID NO: 11846 - protein, 17 aa, Artificial Sequence
  Synthetically generated peptide
  VARIANT (1)..(17): Xaa = Any Amino Acid
ACXEFXCANPACTGXXC

SEQ ID NO: 11847 - protein, 15 aa, Artificial Sequence
  Synthetically generated peptide
  VARIANT (1)..(15): Xaa = Any Amino Acid
ACXEFCAXNPACTGC

SEQ ID NO: 11848 - protein, 16 aa, Artificial Sequence
  Synthetically generated peptide
  VARIANT (1)..(16): Xaa = Any Amino Acid
ACXEFCAXXNPACTGC

SEQ ID NO: 11849 - protein, 17 aa, Artificial Sequence
  Synthetically generated peptide
  VARIANT (1)..(17): Xaa = Any Amino Acid
ACXEFCAXXXNPACTGC

SEQ ID NO: 11850 - protein, 17 aa, Artificial Sequence
  Synthetically generated peptide
  VARIANT (1)..(17): Xaa = Any Amino Acid
ACXEFCAXXNXPACTGC

SEQ ID NO: 11851 - protein, 17 aa, Artificial Sequence
  Synthetically generated peptide
  VARIANT (1)..(17): Xaa = Any Amino Acid
ACXEFCAXXNPXACTGC

SEQ ID NO: 11852 - protein, 17 aa, Artificial Sequence
  Synthetically generated peptide
  VARIANT (1)..(17): Xaa = Any Amino Acid
ACXEFCAXXNPAXCTGC

SEQ ID NO: 11853 - protein, 17 aa, Artificial Sequence
  Synthetically generated peptide
  VARIANT (1)..(17): Xaa = Any Amino Acid
ACXEFCAXXNPACXTGC

SEQ ID NO: 11854 - protein, 17 aa, Artificial Sequence
  Synthetically generated peptide
  VARIANT (1)..(17): Xaa = Any Amino Acid
ACXEFCAXXNPACTXGC

SEQ ID NO: 11855 - protein, 17 aa, Artificial Sequence
  Synthetically generated peptide
  VARIANT (1)..(17): Xaa = Any Amino Acid
ACXEFCAXXNPACTGXC

SEQ ID NO: 11856 - protein, 16 aa, Artificial Sequence
  Synthetically generated peptide
  VARIANT (1)..(16): Xaa = Any Amino Acid
ACXEFCAXNXPACTGC

SEQ ID NO: 11857 - protein, 17 aa, Artificial Sequence
  Synthetically generated peptide
  VARIANT (1)..(17): Xaa = Any Amino Acid
ACXEFCAXNXXPACTGC

SEQ ID NO: 11858 - protein, 17 aa, Artificial Sequence
  Synthetically generated peptide
  VARIANT (1)..(17): Xaa = Any Amino Acid
ACXEFCAXNXPXACTGC

SEQ ID NO: 11859 - protein, 17 aa, Artificial Sequence
  Synthetically generated peptide
  VARIANT (1)..(17): Xaa = Any Amino Acid
ACXEFCAXNXPAXCTGC

SEQ ID NO: 11860 - protein, 17 aa, Artificial Sequence
  Synthetically generated peptide
  VARIANT (1)..(17): Xaa = Any Amino Acid
ACXEFCAXNXPACXTGC

SEQ ID NO: 11861 - protein, 17 aa, Artificial Sequence
  Synthetically generated peptide
  VARIANT (1)..(17): Xaa = Any Amino Acid
ACXEFCAXNXPACTXGC

SEQ ID NO: 11862 - protein, 17 aa, Artificial Sequence
  Synthetically generated peptide
  VARIANT (1)..(17): Xaa = Any Amino Acid
ACXEFCAXNXPACTGXC

SEQ ID NO: 11863 - protein, 16 aa, Artificial Sequence
  Synthetically generated peptide
  VARIANT (1)..(16): Xaa = Any Amino Acid
ACXEFCAXNPXACTGC

SEQ ID NO: 11864 - protein, 17 aa, Artificial Sequence
  Synthetically generated peptide
  VARIANT (1)..(17): Xaa = Any Amino Acid
ACXEFCAXNPXXACTGC

SEQ ID NO: 11865 - protein, 17 aa, Artificial Sequence
  Synthetically generated peptide
  VARIANT (1)..(17): Xaa = Any Amino Acid
ACXEFCAXNPXAXCTGC

SEQ ID NO: 11866 - protein, 17 aa, Artificial Sequence
  Synthetically generated peptide
  VARIANT (1)..(17): Xaa = Any Amino Acid
ACXEFCAXNPXACXTGC

SEQ ID NO: 11867 - protein, 17 aa, Artificial Sequence
  Synthetically generated peptide
  VARIANT (1)..(17): Xaa = Any Amino Acid
ACXEFCAXNPXACTXGC

SEQ ID NO: 11868 - protein, 17 aa, Artificial Sequence
  Synthetically generated peptide
  VARIANT (1)..(17): Xaa = Any Amino Acid
ACXEFCAXNPXACTGXC

SEQ ID NO: 11869 - protein, 16 aa, Artificial Sequence
  Synthetically generated peptide
  VARIANT (1)..(16): Xaa = Any Amino Acid
ACXEFCAXNPAXCTGC

SEQ ID NO: 11870 - protein, 17 aa, Artificial Sequence
  Synthetically generated peptide
  VARIANT (1)..(17): Xaa = Any Amino Acid
ACXEFCAXNPAXXCTGC

SEQ ID NO: 11871 - protein, 17 aa, Artificial Sequence
  Synthetically generated peptide
  VARIANT (1)..(17): Xaa = Any Amino Acid
ACXEFCAXNPAXCXTGC

SEQ ID NO: 11872 - protein, 17 aa, Artificial Sequence
  Synthetically generated peptide
  VARIANT (1)..(17): Xaa = Any Amino Acid
ACXEFCAXNPAXCTXGC

SEQ ID NO: 11873 - protein, 17 aa, Artificial Sequence
  Synthetically generated peptide
  VARIANT (1)..(17): Xaa = Any Amino Acid
ACXEFCAXNPAXCTGXC

SEQ ID NO: 11874 - protein, 16 aa, Artificial Sequence
  Synthetically generated peptide
  VARIANT (1)..(16): Xaa = Any Amino Acid
ACXEFCAXNPACXTGC

SEQ ID NO: 11875 - protein, 17 aa, Artificial Sequence
  Synthetically generated peptide
  VARIANT (1)..(17): Xaa = Any Amino Acid
ACXEFCAXNPACXXTGC

SEQ ID NO: 11876 - protein, 17 aa, Artificial Sequence
  Synthetically generated peptide
  VARIANT (1)..(17): Xaa = Any Amino Acid
ACXEFCAXNPACXTXGC

SEQ ID NO: 11877 - protein, 17 aa, Artificial Sequence
  Synthetically generated peptide
  VARIANT (1)..(17): Xaa = Any Amino Acid
ACXEFCAXNPACXTGXC

SEQ ID NO: 11878 - protein, 16 aa, Artificial Sequence
  Synthetically generated peptide
  VARIANT (1)..(16): Xaa = Any Amino Acid
ACXEFCAXNPACTXGC

SEQ ID NO: 11879 - protein, 17 aa, Artificial Sequence
  Synthetically generated peptide
  VARIANT (1)..(17): Xaa = Any Amino Acid
ACXEFCAXNPACTXXGC

SEQ ID NO: 11880 - protein, 17 aa, Artificial Sequence
  Synthetically generated peptide
  VARIANT (1)..(17): Xaa = Any Amino Acid
ACXEFCAXNPACTXGXC

SEQ ID NO: 11881 - protein, 16 aa, Artificial Sequence
  Synthetically generated peptide
  VARIANT (1)..(16): Xaa = Any Amino Acid
ACXEFCAXNPACTGXC

SEQ ID NO: 11882 - protein, 17 aa, Artificial Sequence
  Synthetically generated peptide
  VARIANT (1)..(17): Xaa = Any Amino Acid
ACXEFCAXNPACTGXXC

SEQ ID NO: 11883 - protein, 15 aa, Artificial Sequence
  Synthetically generated peptide
  VARIANT (1)..(15): Xaa = Any Amino Acid
ACXEFCANXPACTGC

SEQ ID NO: 11884 - protein, 16 aa, Artificial Sequence
  Synthetically generated peptide
  VARIANT (1)..(16): Xaa = Any Amino Acid
ACXEFCANXXPACTGC

SEQ ID NO: 11885 - protein, 17 aa, Artificial Sequence
  Synthetically generated peptide
  VARIANT (1)..(17): Xaa = Any Amino Acid
ACXEFCANXXXPACTGC

SEQ ID NO: 11886 - protein, 17 aa, Artificial Sequence
  Synthetically generated peptide
  VARIANT (1)..(17): Xaa = Any Amino Acid
ACXEFCANXXPXACTGC

SEQ ID NO: 11887 - protein, 17 aa, Artificial Sequence
  Synthetically generated peptide
  VARIANT (1)..(17): Xaa = Any Amino Acid
ACXEFCANXXPAXCTGC

SEQ ID NO: 11888 - protein, 17 aa, Artificial Sequence
  Synthetically generated peptide
  VARIANT (1)..(17): Xaa = Any Amino Acid
ACXEFCANXXPACXTGC

SEQ ID NO: 11889 - protein, 17 aa, Artificial Sequence
  Synthetically generated peptide
  VARIANT (1)..(17): Xaa = Any Amino Acid
ACXEFCANXXPACTXGC

SEQ ID NO: 11890 - protein, 17 aa, Artificial Sequence
  Synthetically generated peptide
  VARIANT (1)..(17): Xaa = Any Amino Acid
ACXEFCANXXPACTGXC

SEQ ID NO: 11891 - protein, 16 aa, Artificial Sequence
  Synthetically generated peptide
  VARIANT (1)..(16): Xaa = Any Amino Acid
ACXEFCANXPXACTGC

SEQ ID NO: 11892 - protein, 17 aa, Artificial Sequence
  Synthetically generated peptide
  VARIANT (1)..(17): Xaa = Any Amino Acid
ACXEFCANXPXXACTGC

SEQ ID NO: 11893 - protein, 17 aa, Artificial Sequence
  Synthetically generated peptide
  VARIANT (1)..(17): Xaa = Any Amino Acid
ACXEFCANXPXAXCTGC

SEQ ID NO: 11894 - protein, 17 aa, Artificial Sequence
  Synthetically generated peptide
  VARIANT (1)..(17): Xaa = Any Amino Acid
ACXEFCANXPXACXTGC

SEQ ID NO: 11895 - protein, 17 aa, Artificial Sequence
  Synthetically generated peptide
  VARIANT (1)..(17): Xaa = Any Amino Acid
ACXEFCANXPXACTXGC

SEQ ID NO: 11896 - protein, 17 aa, Artificial Sequence
  Synthetically generated peptide
  VARIANT (1)..(17): Xaa = Any Amino Acid
ACXEFCANXPXACTGXC

SEQ ID NO: 11897 - protein, 16 aa, Artificial Sequence
  Synthetically generated peptide
  VARIANT (1)..(16): Xaa = Any Amino Acid
ACXEFCANXPAXCTGC

SEQ ID NO: 11898 - protein, 17 aa, Artificial Sequence
  Synthetically generated peptide
  VARIANT (1)..(17): Xaa = Any Amino Acid
ACXEFCANXPAXXCTGC

SEQ ID NO: 11899 - protein, 17 aa, Artificial Sequence
  Synthetically generated peptide
  VARIANT (1)..(17): Xaa = Any Amino Acid
ACXEFCANXPAXCXTGC

SEQ ID NO: 11900 - protein, 17 aa, Artificial Sequence
  Synthetically generated peptide
  VARIANT (1)..(17): Xaa = Any Amino Acid
ACXEFCANXPAXCTXGC

SEQ ID NO: 11901 - protein, 17 aa, Artificial Sequence
  Synthetically generated peptide
  VARIANT (1)..(17): Xaa = Any Amino Acid
ACXEFCANXPAXCTGXC

SEQ ID NO: 11902 - protein, 16 aa, Artificial Sequence
  Synthetically generated peptide
  VARIANT (1)..(16): Xaa = Any Amino Acid
ACXEFCANXPACXTGC

SEQ ID NO: 11903 - protein, 17 aa, Artificial Sequence
  Synthetically generated peptide
  VARIANT (1)..(17): Xaa = Any Amino Acid
ACXEFCANXPACXXTGC

SEQ ID NO: 11904 - protein, 17 aa, Artificial Sequence
  Synthetically generated peptide
  VARIANT (1)..(17): Xaa = Any Amino Acid
ACXEFCANXPACXTXGC

SEQ ID NO: 11905 - protein, 17 aa, Artificial Sequence
  Synthetically generated peptide
  VARIANT (1)..(17): Xaa = Any Amino Acid
ACXEFCANXPACXTGXC

SEQ ID NO: 11906 - protein, 16 aa, Artificial Sequence
  Synthetically generated peptide
  VARIANT (1)..(16): Xaa = Any Amino Acid
ACXEFCANXPACTXGC

SEQ ID NO: 11907 - protein, 17 aa, Artificial Sequence
  Synthetically generated peptide
  VARIANT (1)..(17): Xaa = Any Amino Acid
ACXEFCANXPACTXXGC

SEQ ID NO: 11908 - protein, 17 aa, Artificial Sequence
  Synthetically generated peptide
  VARIANT (1)..(17): Xaa = Any Amino Acid
ACXEFCANXPACTXGXC

SEQ ID NO: 11909 - protein, 16 aa, Artificial Sequence
  Synthetically generated peptide
  VARIANT (1)..(16): Xaa = Any Amino Acid
ACXEFCANXPACTGXC

SEQ ID NO: 11910 - protein, 17 aa, Artificial Sequence
  Synthetically generated peptide
  VARIANT (1)..(17): Xaa = Any Amino Acid
ACXEFCANXPACTGXXC

SEQ ID NO: 11911 - protein, 15 aa, Artificial Sequence
  Synthetically generated peptide
  VARIANT (1)..(15): Xaa = Any Amino Acid
ACXEFCANPXACTGC

SEQ ID NO: 11912 - protein, 16 aa, Artificial Sequence
  Synthetically generated peptide
  VARIANT (1)..(16): Xaa = Any Amino Acid
ACXEFCANPXXACTGC

SEQ ID NO: 11913 - protein, 17 aa, Artificial Sequence
  Synthetically generated peptide
  VARIANT (1)..(17): Xaa = Any Amino Acid
ACXEFCANPXXXACTGC

SEQ ID NO: 11914 - protein, 17 aa, Artificial Sequence
  Synthetically generated peptide
  VARIANT (1)..(17): Xaa = Any Amino Acid
ACXEFCANPXXAXCTGC

SEQ ID NO: 11915 - protein, 17 aa, Artificial Sequence
  Synthetically generated peptide
  VARIANT (1)..(17): Xaa = Any Amino Acid
ACXEFCANPXXACXTGC

SEQ ID NO: 11916 - protein, 17 aa, Artificial Sequence
  Synthetically generated peptide
  VARIANT (1)..(17): Xaa = Any Amino Acid
ACXEFCANPXXACTXGC

SEQ ID NO: 11917 - protein, 17 aa, Artificial Sequence
  Synthetically generated peptide
  VARIANT (1)..(17): Xaa = Any Amino Acid
ACXEFCANPXXACTGXC

SEQ ID NO: 11918 - protein, 16 aa, Artificial Sequence
  Synthetically generated peptide
  VARIANT (1)..(16): Xaa = Any Amino Acid
ACXEFCANPXAXCTGC

SEQ ID NO: 11919 - protein, 17 aa, Artificial Sequence
  Synthetically generated peptide
  VARIANT (1)..(17): Xaa = Any Amino Acid
ACXEFCANPXAXXCTGC

SEQ ID NO: 11920 - protein, 17 aa, Artificial Sequence
  Synthetically generated peptide
  VARIANT (1)..(17): Xaa = Any Amino Acid
ACXEFCANPXAXCXTGC

SEQ ID NO: 11921 - protein, 17 aa, Artificial Sequence
  Synthetically generated peptide
  VARIANT (1)..(17): Xaa = Any Amino Acid
ACXEFCANPXAXCTXGC

SEQ ID NO: 11922 - protein, 17 aa, Artificial Sequence
  Synthetically generated peptide
  VARIANT (1)..(17): Xaa = Any Amino Acid
ACXEFCANPXAXCTGXC

SEQ ID NO: 11923 - protein, 16 aa, Artificial Sequence
  Synthetically generated peptide
  VARIANT (1)..(16): Xaa = Any Amino Acid
ACXEFCANPXACXTGC

SEQ ID NO: 11924 - protein, 17 aa, Artificial Sequence
  Synthetically generated peptide
  VARIANT (1)..(17): Xaa = Any Amino Acid
ACXEFCANPXACXXTGC

SEQ ID NO: 11925 - protein, 17 aa, Artificial Sequence
  Synthetically generated peptide
  VARIANT (1)..(17): Xaa = Any Amino Acid
ACXEFCANPXACXTXGC

SEQ ID NO: 11926 - protein, 17 aa, Artificial Sequence
  Synthetically generated peptide
  VARIANT (1)..(17): Xaa = Any Amino Acid
ACXEFCANPXACXTGXC

SEQ ID NO: 11927 - protein, 16 aa, Artificial Sequence
  Synthetically generated peptide
  VARIANT (1)..(16): Xaa = Any Amino Acid
ACXEFCANPXACTXGC

SEQ ID NO: 11928 - protein, 17 aa, Artificial Sequence
  Synthetically generated peptide
  VARIANT (1)..(17): Xaa = Any Amino Acid
ACXEFCANPXACTXXGC

SEQ ID NO: 11929 - protein, 17 aa, Artificial Sequence
  Synthetically generated peptide
  VARIANT (1)..(17): Xaa = Any Amino Acid
ACXEFCANPXACTXGXC

SEQ ID NO: 11930 - protein, 16 aa, Artificial Sequence
  Synthetically generated peptide
  VARIANT (1)..(16): Xaa = Any Amino Acid
ACXEFCANPXACTGXC

SEQ ID NO: 11931 - protein, 17 aa, Artificial Sequence
  Synthetically generated peptide
  VARIANT (1)..(17): Xaa = Any Amino Acid
ACXEFCANPXACTGXXC

SEQ ID NO: 11932 - protein, 15 aa, Artificial Sequence
  Synthetically generated peptide
  VARIANT (1)..(15): Xaa = Any Amino Acid
ACXEFCANPAXCTGC

SEQ ID NO: 11933 - protein, 16 aa, Artificial Sequence
  Synthetically generated peptide
  VARIANT (1)..(16): Xaa = Any Amino Acid
ACXEFCANPAXXCTGC

SEQ ID NO: 11934 - protein, 17 aa, Artificial Sequence
  Synthetically generated peptide
  VARIANT (1)..(17): Xaa = Any Amino Acid
ACXEFCANPAXXXCTGC

SEQ ID NO: 11935 - protein, 17 aa, Artificial Sequence
  Synthetically generated peptide
  VARIANT (1)..(17): Xaa = Any Amino Acid
ACXEFCANPAXXCXTGC

SEQ ID NO: 11936 - protein, 17 aa, Artificial Sequence
  Synthetically generated peptide
  VARIANT (1)..(17): Xaa = Any Amino Acid
ACXEFCANPAXXCTXGC

SEQ ID NO: 11937 - protein, 17 aa, Artificial Sequence
  Synthetically generated peptide
  VARIANT (1)..(17): Xaa = Any Amino Acid
ACXEFCANPAXXCTGXC

SEQ ID NO: 11938 - protein, 16 aa, Artificial Sequence
  Synthetically generated peptide
  VARIANT (1)..(16): Xaa = Any Amino Acid
ACXEFCANPAXCXTGC

SEQ ID NO: 11939 - protein, 17 aa, Artificial Sequence
  Synthetically generated peptide
  VARIANT (1)..(17): Xaa = Any Amino Acid
ACXEFCANPAXCXXTGC

SEQ ID NO: 11940 - protein, 17 aa, Artificial Sequence
  Synthetically generated peptide
  VARIANT (1)..(17): Xaa = Any Amino Acid
ACXEFCANPAXCXTXGC

SEQ ID NO: 11941 - protein, 17 aa, Artificial Sequence
  Synthetically generated peptide
  VARIANT (1)..(17): Xaa = Any Amino Acid
ACXEFCANPAXCXTGXC

SEQ ID NO: 11942 - protein, 16 aa, Artificial Sequence
  Synthetically generated peptide
  VARIANT (1)..(16): Xaa = Any Amino Acid
ACXEFCANPAXCTXGC

SEQ ID NO: 11943 - protein, 17 aa, Artificial Sequence
  Synthetically generated peptide
  VARIANT (1)..(17): Xaa = Any Amino Acid
ACXEFCANPAXCTXXGC

SEQ ID NO: 11944 - protein, 17 aa, Artificial Sequence
  Synthetically generated peptide
  VARIANT (1)..(17): Xaa = Any Amino Acid
ACXEFCANPAXCTXGXC

SEQ ID NO: 11945 - protein, 16 aa, Artificial Sequence
  Synthetically generated peptide
  VARIANT (1)..(16): Xaa = Any Amino Acid
ACXEFCANPAXCTGXC

SEQ ID NO: 11946 - protein, 17 aa, Artificial Sequence
  Synthetically generated peptide
  VARIANT (1)..(17): Xaa = Any Amino Acid
ACXEFCANPAXCTGXXC

SEQ ID NO: 11947 - protein, 15 aa, Artificial Sequence
  Synthetically generated peptide
  VARIANT (1)..(15): Xaa = Any Amino Acid
ACXEFCANPACXTGC

SEQ ID NO: 11948 - protein, 16 aa, Artificial Sequence
  Synthetically generated peptide
  VARIANT (1)..(16): Xaa = Any Amino Acid
ACXEFCANPACXXTGC

SEQ ID NO: 11949 - protein, 17 aa, Artificial Sequence
  Synthetically generated peptide
  VARIANT (1)..(17): Xaa = Any Amino Acid
ACXEFCANPACXXXTGC

SEQ ID NO: 11950 - protein, 17 aa, Artificial Sequence
  Synthetically generated peptide
  VARIANT (1)..(17): Xaa = Any Amino Acid
ACXEFCANPACXXTXGC

SEQ ID NO: 11951 - protein, 17 aa, Artificial Sequence
  Synthetically generated peptide
  VARIANT (1)..(17): Xaa = Any Amino Acid
ACXEFCANPACXXTGXC

SEQ ID NO: 11952 - protein, 16 aa, Artificial Sequence
  Synthetically generated peptide
  VARIANT (1)..(16): Xaa = Any Amino Acid
ACXEFCANPACXTXGC

SEQ ID NO: 11953 - protein, 17 aa, Artificial Sequence
  Synthetically generated peptide
  VARIANT (1)..(17): Xaa = Any Amino Acid
ACXEFCANPACXTXXGC

SEQ ID NO: 11954 - protein, 17 aa, Artificial Sequence
  Synthetically generated peptide
  VARIANT (1)..(17): Xaa = Any Amino Acid
ACXEFCANPACXTXGXC

SEQ ID NO: 11955 - protein, 16 aa, Artificial Sequence
  Synthetically generated peptide
  VARIANT (1)..(16): Xaa = Any Amino Acid
ACXEFCANPACXTGXC

SEQ ID NO: 11956 - protein, 17 aa, Artificial Sequence
  Synthetically generated peptide
  VARIANT (1)..(17): Xaa = Any Amino Acid
ACXEFCANPACXTGXXC

SEQ ID NO: 11957 - protein, 15 aa, Artificial Sequence
  Synthetically generated peptide
  VARIANT (1)..(15): Xaa = Any Amino Acid
ACXEFCANPACTXGC

SEQ ID NO: 11958 - protein, 16 aa, Artificial Sequence
  Synthetically generated peptide
  VARIANT (1)..(16): Xaa = Any Amino Acid
ACXEFCANPACTXXGC

SEQ ID NO: 11959 - protein, 17 aa, Artificial Sequence
  Synthetically generated peptide
  VARIANT (1)..(17): Xaa = Any Amino Acid
ACXEFCANPACTXXXGC

SEQ ID NO: 11960 - protein, 17 aa, Artificial Sequence
  Synthetically generated peptide
  VARIANT (1)..(17): Xaa = Any Amino Acid
ACXEFCANPACTXXGXC

SEQ ID NO: 11961 - protein, 16 aa, Artificial Sequence
  Synthetically generated peptide
  VARIANT (1)..(16): Xaa = Any Amino Acid
ACXEFCANPACTXGXC

SEQ ID NO: 11962 - protein, 17 aa, Artificial Sequence
  Synthetically generated peptide
  VARIANT (1)..(17): Xaa = Any Amino Acid
ACXEFCANPACTXGXXC

SEQ ID NO: 11963 - protein, 15 aa, Artificial Sequence
  Synthetically generated peptide
  VARIANT (1)..(15): Xaa = Any Amino Acid
ACXEFCANPACTGXC

SEQ ID NO: 11964 - protein, 16 aa, Artificial Sequence
  Synthetically generated peptide
  VARIANT (1)..(16): Xaa = Any Amino Acid
ACXEFCANPACTGXXC

SEQ ID NO: 11965 - protein, 17 aa, Artificial Sequence
  Synthetically generated peptide
  VARIANT (1)..(17): Xaa = Any Amino Acid
ACXEFCANPACTGXXXC

SEQ ID NO: 11966 - protein, 14 aa, Artificial Sequence
  Synthetically generated peptide
  VARIANT (1)..(14): Xaa = Any Amino Acid
ACEXFCANPACTGC

SEQ ID NO: 11967 - protein, 15 aa, Artificial Sequence
  Synthetically generated peptide
  VARIANT (1)..(15): Xaa = Any Amino Acid
ACEXXFCANPACTGC

SEQ ID NO: 11968 - protein, 16 aa, Artificial Sequence
  Synthetically generated peptide
  VARIANT (1)..(16): Xaa = Any Amino Acid
ACEXXXFCANPACTGC

SEQ ID NO: 11969 - protein, 17 aa, Artificial Sequence
  Synthetically generated peptide
  VARIANT (1)..(17): Xaa = Any Amino Acid
ACEXXXXFCANPACTGC

SEQ ID NO: 11970 - protein, 17 aa, Artificial Sequence
  Synthetically generated peptide
  VARIANT (1)..(17): Xaa = Any Amino Acid
ACEXXXFXCANPACTGC

SEQ ID NO: 11971 - protein, 17 aa, Artificial Sequence
  Synthetically generated peptide
  VARIANT (1)..(17): Xaa = Any Amino Acid
ACEXXXFCAXNPACTGC

SEQ ID NO: 11972 - protein, 17 aa, Artificial Sequence
  Synthetically generated peptide
  VARIANT (1)..(17): Xaa = Any Amino Acid
ACEXXXFCANXPACTGC

SEQ ID NO: 11973 - protein, 17 aa, Artificial Sequence
  Synthetically generated peptide
  VARIANT (1)..(17): Xaa = Any Amino Acid
ACEXXXFCANPXACTGC

SEQ ID NO: 11974 - protein, 17 aa, Artificial Sequence
  Synthetically generated peptide
  VARIANT (1)..(17): Xaa = Any Amino Acid
ACEXXXFCANPAXCTGC

SEQ ID NO: 11975 - protein, 17 aa, Artificial Sequence
  Synthetically generated peptide
  VARIANT (1)..(17): Xaa = Any Amino Acid
ACEXXXFCANPACXTGC

SEQ ID NO: 11976 - protein, 17 aa, Artificial Sequence
  Synthetically generated peptide
  VARIANT (1)..(17): Xaa = Any Amino Acid
ACEXXXFCANPACTXGC

SEQ ID NO: 11977 - protein, 17 aa, Artificial Sequence
  Synthetically generated peptide
  VARIANT (1)..(17): Xaa = Any Amino Acid
ACEXXXFCANPACTGXC

SEQ ID NO: 11978 - protein, 16 aa, Artificial Sequence
  Synthetically generated peptide
  VARIANT (1)..(16): Xaa = Any Amino Acid
ACEXXFXCANPACTGC

SEQ ID NO: 11979 - protein, 17 aa, Artificial Sequence
  Synthetically generated peptide
  VARIANT (1)..(17): Xaa = Any Amino Acid
ACEXXFXXCANPACTGC

SEQ ID NO: 11980 - protein, 17 aa, Artificial Sequence
  Synthetically generated peptide
  VARIANT (1)..(17): Xaa = Any Amino Acid
ACEXXFXCAXNPACTGC

SEQ ID NO: 11981 - protein, 17 aa, Artificial Sequence
  Synthetically generated peptide
  VARIANT (1)..(17): Xaa = Any Amino Acid
ACEXXFXCANXPACTGC

SEQ ID NO: 11982 - protein, 17 aa, Artificial Sequence
  Synthetically generated peptide
  VARIANT (1)..(17): Xaa = Any Amino Acid
ACEXXFXCANPXACTGC

SEQ ID NO: 11983 - protein, 17 aa, Artificial Sequence
  Synthetically generated peptide
  VARIANT (1)..(17): Xaa = Any Amino Acid
ACEXXFXCANPAXCTGC

SEQ ID NO: 11984 - protein, 17 aa, Artificial Sequence
  Synthetically generated peptide
  VARIANT (1)..(17): Xaa = Any Amino Acid
ACEXXFXCANPACXTGC

SEQ ID NO: 11985 - protein, 17 aa, Artificial Sequence
  Synthetically generated peptide
  VARIANT (1)..(17): Xaa = Any Amino Acid
ACEXXFXCANPACTXGC

SEQ ID NO: 11986 - protein, 17 aa, Artificial Sequence
  Synthetically generated peptide
  VARIANT (1)..(17): Xaa = Any Amino Acid
ACEXXFXCANPACTGXC

SEQ ID NO: 11987 - protein, 16 aa, Artificial Sequence
  Synthetically generated peptide
  VARIANT (1)..(16): Xaa = Any Amino Acid
ACEXXFCAXNPACTGC

SEQ ID NO: 11988 - protein, 17 aa, Artificial Sequence
  Synthetically generated peptide
  VARIANT (1)..(17): Xaa = Any Amino Acid
ACEXXFCAXXNPACTGC

SEQ ID NO: 11989 - protein, 17 aa, Artificial Sequence
  Synthetically generated peptide
  VARIANT (1)..(17): Xaa = Any Amino Acid
ACEXXFCAXNXPACTGC

SEQ ID NO: 11990 - protein, 17 aa, Artificial Sequence
  Synthetically generated peptide
  VARIANT (1)..(17): Xaa = Any Amino Acid
ACEXXFCAXNPXACTGC

SEQ ID NO: 11991 - protein, 17 aa, Artificial Sequence
  Synthetically generated peptide
  VARIANT (1)..(17): Xaa = Any Amino Acid
ACEXXFCAXNPAXCTGC

SEQ ID NO: 11992 - protein, 17 aa, Artificial Sequence
  Synthetically generated peptide
  VARIANT (1)..(17): Xaa = Any Amino Acid
ACEXXFCAXNPACXTGC

SEQ ID NO: 11993 - protein, 17 aa, Artificial Sequence
  Synthetically generated peptide
  VARIANT (1)..(17): Xaa = Any Amino Acid
ACEXXFCAXNPACTXGC

SEQ ID NO: 11994 - protein, 17 aa, Artificial Sequence
  Synthetically generated peptide
  VARIANT (1)..(17): Xaa = Any Amino Acid
ACEXXFCAXNPACTGXC

SEQ ID NO: 11995 - protein, 16 aa, Artificial Sequence
  Synthetically generated peptide
  VARIANT (1)..(16): Xaa = Any Amino Acid
ACEXXFCANXPACTGC

SEQ ID NO: 11996 - protein, 17 aa, Artificial Sequence
  Synthetically generated peptide
  VARIANT (1)..(17): Xaa = Any Amino Acid
ACEXXFCANXXPACTGC

SEQ ID NO: 11997 - protein, 17 aa, Artificial Sequence
  Synthetically generated peptide
  VARIANT (1)..(17): Xaa = Any Amino Acid
ACEXXFCANXPXACTGC

SEQ ID NO: 11998 - protein, 17 aa, Artificial Sequence
  Synthetically generated peptide
  VARIANT (1)..(17): Xaa = Any Amino Acid
ACEXXFCANXPAXCTGC

SEQ ID NO: 11999 - protein, 17 aa, Artificial Sequence
  Synthetically generated peptide
  VARIANT (1)..(17): Xaa = Any Amino Acid
ACEXXFCANXPACXTGC

SEQ ID NO: 12000 - protein, 17 aa, Artificial Sequence
  Synthetically generated peptide
  VARIANT (1)..(17): Xaa = Any Amino Acid
ACEXXFCANXPACTXGC

SEQ ID NO: 12001 - protein, 17 aa, Artificial Sequence
  Synthetically generated peptide
  VARIANT (1)..(17): Xaa = Any Amino Acid
ACEXXFCANXPACTGXC

SEQ ID NO: 12002 - protein, 16 aa, Artificial Sequence
  Synthetically generated peptide
  VARIANT (1)..(16): Xaa = Any Amino Acid
ACEXXFCANPXACTGC

SEQ ID NO: 12003 - protein, 17 aa, Artificial Sequence
  Synthetically generated peptide
  VARIANT (1)..(17): Xaa = Any Amino Acid
ACEXXFCANPXXACTGC

SEQ ID NO: 12004 - protein, 17 aa, Artificial Sequence
  Synthetically generated peptide
  VARIANT (1)..(17): Xaa = Any Amino Acid
ACEXXFCANPXAXCTGC

SEQ ID NO: 12005 - protein, 17 aa, Artificial Sequence
  Synthetically generated peptide
  VARIANT (1)..(17): Xaa = Any Amino Acid
ACEXXFCANPXACXTGC

SEQ ID NO: 12006 - protein, 17 aa, Artificial Sequence
  Synthetically generated peptide
  VARIANT (1)..(17): Xaa = Any Amino Acid
ACEXXFCANPXACTXGC

SEQ ID NO: 12007 - protein, 17 aa, Artificial Sequence
  Synthetically generated peptide
  VARIANT (1)..(17): Xaa = Any Amino Acid
ACEXXFCANPXACTGXC

SEQ ID NO: 12008 - protein, 16 aa, Artificial Sequence
  Synthetically generated peptide
  VARIANT (1)..(16): Xaa = Any Amino Acid
ACEXXFCANPAXCTGC

SEQ ID NO: 12009 - protein, 17 aa, Artificial Sequence
  Synthetically generated peptide
  VARIANT (1)..(17): Xaa = Any Amino Acid
ACEXXFCANPAXXCTGC

SEQ ID NO: 12010 - protein, 17 aa, Artificial Sequence
  Synthetically generated peptide
  VARIANT (1)..(17): Xaa = Any Amino Acid
ACEXXFCANPAXCXTGC

SEQ ID NO: 12011 - protein, 17 aa, Artificial Sequence
  Synthetically generated peptide
  VARIANT (1)..(17): Xaa = Any Amino Acid
ACEXXFCANPAXCTXGC

SEQ ID NO: 12012 - protein, 17 aa, Artificial Sequence
  Synthetically generated peptide
  VARIANT (1)..(17): Xaa = Any Amino Acid
ACEXXFCANPAXCTGXC

SEQ ID NO: 12013 - protein, 16 aa, Artificial Sequence
  Synthetically generated peptide
  VARIANT (1)..(16): Xaa = Any Amino Acid
ACEXXFCANPACXTGC

SEQ ID NO: 12014 - protein, 17 aa, Artificial Sequence
  Synthetically generated peptide
  VARIANT (1)..(17): Xaa = Any Amino Acid
ACEXXFCANPACXXTGC

SEQ ID NO: 12015 - protein, 17 aa, Artificial Sequence
  Synthetically generated peptide
  VARIANT (1)..(17): Xaa = Any Amino Acid
ACEXXFCANPACXTXGC

SEQ ID NO: 12016 - protein, 17 aa, Artificial Sequence
  Synthetically generated peptide
  VARIANT (1)..(17): Xaa = Any Amino Acid
ACEXXFCANPACXTGXC

SEQ ID NO: 12017 - protein, 16 aa, Artificial Sequence
  Synthetically generated peptide
  VARIANT (1)..(16): Xaa = Any Amino Acid
ACEXXFCANPACTXGC

SEQ ID NO: 12018 - protein, 17 aa, Artificial Sequence
  Synthetically generated peptide
  VARIANT (1)..(17): Xaa = Any Amino Acid
ACEXXFCANPACTXXGC

SEQ ID NO: 12019 - protein, 17 aa, Artificial Sequence
  Synthetically generated peptide
  VARIANT (1)..(17): Xaa = Any Amino Acid
ACEXXFCANPACTXGXC

SEQ ID NO: 12020 - protein, 16 aa, Artificial Sequence
  Synthetically generated peptide
  VARIANT (1)..(16): Xaa = Any Amino Acid
ACEXXFCANPACTGXC

SEQ ID NO: 12021 - protein, 17 aa, Artificial Sequence
  Synthetically generated peptide
  VARIANT (1)..(17): Xaa = Any Amino Acid
ACEXXFCANPACTGXXC

SEQ ID NO: 12022 - protein, 15 aa, Artificial Sequence
  Synthetically generated peptide
  VARIANT (1)..(15): Xaa = Any Amino Acid
ACEXFXCANPACTGC

SEQ ID NO: 12023 - protein, 16 aa, Artificial Sequence
  Synthetically generated peptide
  VARIANT (1)..(16): Xaa = Any Amino Acid
ACEXFXXCANPACTGC

SEQ ID NO: 12024 - protein, 17 aa, Artificial Sequence
  Synthetically generated peptide
  VARIANT (1)..(17): Xaa = Any Amino Acid
ACEXFXXXCANPACTGC

SEQ ID NO: 12025 - protein, 17 aa, Artificial Sequence
  Synthetically generated peptide
  VARIANT (1)..(17): Xaa = Any Amino Acid
ACEXFXXCAXNPACTGC

SEQ ID NO: 12026 - protein, 17 aa, Artificial Sequence
  Synthetically generated peptide
  VARIANT (1)..(17): Xaa = Any Amino Acid
ACEXFXXCANXPACTGC

SEQ ID NO: 12027 - protein, 17 aa, Artificial Sequence
  Synthetically generated peptide
  VARIANT (1)..(17): Xaa = Any Amino Acid
ACEXFXXCANPXACTGC

SEQ ID NO: 12028 - protein, 17 aa, Artificial Sequence
  Synthetically generated peptide
  VARIANT (1)..(17): Xaa = Any Amino Acid
ACEXFXXCANPAXCTGC

SEQ ID NO: 12029 - protein, 17 aa, Artificial Sequence
  Synthetically generated peptide
  VARIANT (1)..(17): Xaa = Any Amino Acid
ACEXFXXCANPACXTGC

SEQ ID NO: 12030 - protein, 17 aa, Artificial Sequence
  Synthetically generated peptide
  VARIANT (1)..(17): Xaa = Any Amino Acid
ACEXFXXCANPACTXGC

SEQ ID NO: 12031 - protein, 17 aa, Artificial Sequence
  Synthetically generated peptide
  VARIANT (1)..(17): Xaa = Any Amino Acid
ACEXFXXCANPACTGXC

SEQ ID NO: 12032 - protein, 16 aa, Artificial Sequence
  Synthetically generated peptide
  VARIANT (1)..(16): Xaa = Any Amino Acid
ACEXFXCAXNPACTGC

SEQ ID NO: 12033 - protein, 17 aa, Artificial Sequence
  Synthetically generated peptide
  VARIANT (1)..(17): Xaa = Any Amino Acid
ACEXFXCAXXNPACTGC

SEQ ID NO: 12034 - protein, 17 aa, Artificial Sequence
  Synthetically generated peptide
  VARIANT (1)..(17): Xaa = Any Amino Acid
ACEXFXCAXNXPACTGC

SEQ ID NO: 12035 - protein, 17 aa, Artificial Sequence
  Synthetically generated peptide
  VARIANT (1)..(17): Xaa = Any Amino Acid
ACEXFXCAXNPXACTGC

SEQ ID NO: 12036 - protein, 17 aa, Artificial Sequence
  Synthetically generated peptide
  VARIANT (1)..(17): Xaa = Any Amino Acid
ACEXFXCAXNPAXCTGC

SEQ ID NO: 12037 - protein, 17 aa, Artificial Sequence
  Synthetically generated peptide
  VARIANT (1)..(17): Xaa = Any Amino Acid
ACEXFXCAXNPACXTGC

SEQ ID NO: 12038 - protein, 17 aa, Artificial Sequence
  Synthetically generated peptide
  VARIANT (1)..(17): Xaa = Any Amino Acid
ACEXFXCAXNPACTXGC

SEQ ID NO: 12039 - protein, 17 aa, Artificial Sequence
  Synthetically generated peptide
  VARIANT (1)..(17): Xaa = Any Amino Acid
ACEXFXCAXNPACTGXC

SEQ ID NO: 12040 - protein, 16 aa, Artificial Sequence
  Synthetically generated peptide
  VARIANT (1)..(16): Xaa = Any Amino Acid
ACEXFXCANXPACTGC

SEQ ID NO: 12041 - protein, 17 aa, Artificial Sequence
  Synthetically generated peptide
  VARIANT (1)..(17): Xaa = Any Amino Acid
ACEXFXCANXXPACTGC

SEQ ID NO: 12042 - protein, 17 aa, Artificial Sequence
  Synthetically generated peptide
  VARIANT (1)..(17): Xaa = Any Amino Acid
ACEXFXCANXPXACTGC

SEQ ID NO: 12043 - protein, 17 aa, Artificial Sequence
  Synthetically generated peptide
  VARIANT (1)..(17): Xaa = Any Amino Acid
ACEXFXCANXPAXCTGC

SEQ ID NO: 12044 - protein, 17 aa, Artificial Sequence
  Synthetically generated peptide
  VARIANT (1)..(17): Xaa = Any Amino Acid
ACEXFXCANXPACXTGC

SEQ ID NO: 12045 - protein, 17 aa, Artificial Sequence
  Synthetically generated peptide
  VARIANT (1)..(17): Xaa = Any Amino Acid
ACEXFXCANXPACTXGC

SEQ ID NO: 12046 - protein, 17 aa, Artificial Sequence
  Synthetically generated peptide
  VARIANT (1)..(17): Xaa = Any Amino Acid
ACEXFXCANXPACTGXC

SEQ ID NO: 12047 - protein, 16 aa, Artificial Sequence
  Synthetically generated peptide
  VARIANT (1)..(16): Xaa = Any Amino Acid
ACEXFXCANPXACTGC

SEQ ID NO: 12048 - protein, 17 aa, Artificial Sequence
  Synthetically generated peptide
  VARIANT (1)..(17): Xaa = Any Amino Acid
ACEXFXCANPXXACTGC

SEQ ID NO: 12049 - protein, 17 aa, Artificial Sequence
  Synthetically generated peptide
  VARIANT (1)..(17): Xaa = Any Amino Acid
ACEXFXCANPXAXCTGC

SEQ ID NO: 12050 - protein, 17 aa, Artificial Sequence
  Synthetically generated peptide
  VARIANT (1)..(17): Xaa = Any Amino Acid
ACEXFXCANPXACXTGC

SEQ ID NO: 12051 - protein, 17 aa, Artificial Sequence
  Synthetically generated peptide
  VARIANT (1)..(17): Xaa = Any Amino Acid
ACEXFXCANPXACTXGC

SEQ ID NO: 12052 - protein, 17 aa, Artificial Sequence
  Synthetically generated peptide
  VARIANT (1)..(17): Xaa = Any Amino Acid
ACEXFXCANPXACTGXC

SEQ ID NO: 12053 - protein, 16 aa, Artificial Sequence
  Synthetically generated peptide
  VARIANT (1)..(16): Xaa = Any Amino Acid
ACEXFXCANPAXCTGC

SEQ ID NO: 12054 - protein, 17 aa, Artificial Sequence
  Synthetically generated peptide
  VARIANT (1)..(17): Xaa = Any Amino Acid
ACEXFXCANPAXXCTGC

SEQ ID NO: 12055 - protein, 17 aa, Artificial Sequence
  Synthetically generated peptide
  VARIANT (1)..(17): Xaa = Any Amino Acid
ACEXFXCANPAXCXTGC

SEQ ID NO: 12056 - protein, 17 aa, Artificial Sequence
  Synthetically generated peptide
  VARIANT (1)..(17): Xaa = Any Amino Acid
ACEXFXCANPAXCTXGC

SEQ ID NO: 12057 - protein, 17 aa, Artificial Sequence
  Synthetically generated peptide
  VARIANT (1)..(17): Xaa = Any Amino Acid
ACEXFXCANPAXCTGXC

SEQ ID NO: 12058 - protein, 16 aa, Artificial Sequence
  Synthetically generated peptide
  VARIANT (1)..(16): Xaa = Any Amino Acid
ACEXFXCANPACXTGC

SEQ ID NO: 12059 - protein, 17 aa, Artificial Sequence
  Synthetically generated peptide
  VARIANT (1)..(17): Xaa = Any Amino Acid
ACEXFXCANPACXXTGC

SEQ ID NO: 12060 - protein, 17 aa, Artificial Sequence
  Synthetically generated peptide
  VARIANT (1)..(17): Xaa = Any Amino Acid
ACEXFXCANPACXTXGC

SEQ ID NO: 12061 - protein, 17 aa, Artificial Sequence
  Synthetically generated peptide
  VARIANT (1)..(17): Xaa = Any Amino Acid
ACEXFXCANPACXTGXC

SEQ ID NO: 12062 - protein, 16 aa, Artificial Sequence
  Synthetically generated peptide
  VARIANT (1)..(16): Xaa = Any Amino Acid
ACEXFXCANPACTXGC

SEQ ID NO: 12063 - protein, 17 aa, Artificial Sequence
  Synthetically generated peptide
  VARIANT (1)..(17): Xaa = Any Amino Acid
ACEXFXCANPACTXXGC

SEQ ID NO: 12064 - protein, 17 aa, Artificial Sequence
  Synthetically generated peptide
  VARIANT (1)..(17): Xaa = Any Amino Acid
ACEXFXCANPACTXGXC

SEQ ID NO: 12065 - protein, 16 aa, Artificial Sequence
  Synthetically generated peptide
  VARIANT (1)..(16): Xaa = Any Amino Acid
ACEXFXCANPACTGXC

SEQ ID NO: 12066 - protein, 17 aa, Artificial Sequence
  Synthetically generated peptide
  VARIANT (1)..(17): Xaa = Any Amino Acid
ACEXFXCANPACTGXXC

SEQ ID NO: 12067 - protein, 15 aa, Artificial Sequence
  Synthetically generated peptide
  VARIANT (1)..(15): Xaa = Any Amino Acid
ACEXFCAXNPACTGC

SEQ ID NO: 12068 - protein, 16 aa, Artificial Sequence
  Synthetically generated peptide
  VARIANT (1)..(16): Xaa = Any Amino Acid
ACEXFCAXXNPACTGC

SEQ ID NO: 12069 - protein, 17 aa, Artificial Sequence
  Synthetically generated peptide
  VARIANT (1)..(17): Xaa = Any Amino Acid
ACEXFCAXXXNPACTGC

SEQ ID NO: 12070 - protein, 17 aa, Artificial Sequence
  Synthetically generated peptide
  VARIANT (1)..(17): Xaa = Any Amino Acid
ACEXFCAXXNXPACTGC

SEQ ID NO: 12071 - protein, 17 aa, Artificial Sequence
  Synthetically generated peptide
  VARIANT (1)..(17): Xaa = Any Amino Acid
ACEXFCAXXNPXACTGC

SEQ ID NO: 12072 - protein, 17 aa, Artificial Sequence
  Synthetically generated peptide
  VARIANT (1)..(17): Xaa = Any Amino Acid
ACEXFCAXXNPAXCTGC

SEQ ID NO: 12073 - protein, 17 aa, Artificial Sequence
  Synthetically generated peptide
  VARIANT (1)..(17): Xaa = Any Amino Acid
ACEXFCAXXNPACXTGC

SEQ ID NO: 12074 - protein, 17 aa, Artificial Sequence
  Synthetically generated peptide
  VARIANT (1)..(17): Xaa = Any Amino Acid
ACEXFCAXXNPACTXGC

SEQ ID NO: 12075 - protein, 17 aa, Artificial Sequence
  Synthetically generated peptide
  VARIANT (1)..(17): Xaa = Any Amino Acid
ACEXFCAXXNPACTGXC

SEQ ID NO: 12076 - protein, 16 aa, Artificial Sequence
  Synthetically generated peptide
  VARIANT (1)..(16): Xaa = Any Amino Acid
ACEXFCAXNXPACTGC

SEQ ID NO: 12077 - protein, 17 aa, Artificial Sequence
  Synthetically generated peptide
  VARIANT (1)..(17): Xaa = Any Amino Acid
ACEXFCAXNXXPACTGC

SEQ ID NO: 12078 - protein, 17 aa, Artificial Sequence
  Synthetically generated peptide
  VARIANT (1)..(17): Xaa = Any Amino Acid
ACEXFCAXNXPXACTGC

SEQ ID NO: 12079 - protein, 17 aa, Artificial Sequence
  Synthetically generated peptide
  VARIANT (1)..(17): Xaa = Any Amino Acid
ACEXFCAXNXPAXCTGC

SEQ ID NO: 12080 - protein, 17 aa, Artificial Sequence
  Synthetically generated peptide
  VARIANT (1)..(17): Xaa = Any Amino Acid
ACEXFCAXNXPACXTGC

SEQ ID NO: 12081 - protein, 17 aa, Artificial Sequence
  Synthetically generated peptide
  VARIANT (1)..(17): Xaa = Any Amino Acid
ACEXFCAXNXPACTXGC

SEQ ID NO: 12082 - protein, 17 aa, Artificial Sequence
  Synthetically generated peptide
  VARIANT (1)..(17): Xaa = Any Amino Acid
ACEXFCAXNXPACTGXC

SEQ ID NO: 12083 - protein, 16 aa, Artificial Sequence
  Synthetically generated peptide
  VARIANT (1)..(16): Xaa = Any Amino Acid
ACEXFCAXNPXACTGC

SEQ ID NO: 12084 - protein, 17 aa, Artificial Sequence
  Synthetically generated peptide
  VARIANT (1)..(17): Xaa = Any Amino Acid
ACEXFCAXNPXXACTGC

SEQ ID NO: 12085 - protein, 17 aa, Artificial Sequence
  Synthetically generated peptide
  VARIANT (1)..(17): Xaa = Any Amino Acid
ACEXFCAXNPXAXCTGC

SEQ ID NO: 12086 - protein, 17 aa, Artificial Sequence
  Synthetically generated peptide
  VARIANT (1)..(17): Xaa = Any Amino Acid
ACEXFCAXNPXACXTGC

SEQ ID NO: 12087 - protein, 17 aa, Artificial Sequence
  Synthetically generated peptide
  VARIANT (1)..(17): Xaa = Any Amino Acid
ACEXFCAXNPXACTXGC

SEQ ID NO: 12088 - protein, 17 aa, Artificial Sequence
  Synthetically generated peptide
  VARIANT (1)..(17): Xaa = Any Amino Acid
ACEXFCAXNPXACTGXC

SEQ ID NO: 12089 - protein, 16 aa, Artificial Sequence
  Synthetically generated peptide
  VARIANT (1)..(16): Xaa = Any Amino Acid
ACEXFCAXNPAXCTGC

SEQ ID NO: 12090 - protein, 17 aa, Artificial Sequence
  Synthetically generated peptide
  VARIANT (1)..(17): Xaa = Any Amino Acid
ACEXFCAXNPAXXCTGC

SEQ ID NO: 12091 - protein, 17 aa, Artificial Sequence
  Synthetically generated peptide
  VARIANT (1)..(17): Xaa = Any Amino Acid
ACEXFCAXNPAXCXTGC

SEQ ID NO: 12092 - protein, 17 aa, Artificial Sequence
  Synthetically generated peptide
  VARIANT (1)..(17): Xaa = Any Amino Acid
ACEXFCAXNPAXCTXGC

SEQ ID NO: 12093 - protein, 17 aa, Artificial Sequence
  Synthetically generated peptide
  VARIANT (1)..(17): Xaa = Any Amino Acid
ACEXFCAXNPAXCTGXC

SEQ ID NO: 12094 - protein, 16 aa, Artificial Sequence
  Synthetically generated peptide
  VARIANT (1)..(16): Xaa = Any Amino Acid
ACEXFCAXNPACXTGC

SEQ ID NO: 12095 - protein, 17 aa, Artificial Sequence
  Synthetically generated peptide
  VARIANT (1)..(17): Xaa = Any Amino Acid
ACEXFCAXNPACXXTGC

SEQ ID NO: 12096 - protein, 17 aa, Artificial Sequence
  Synthetically generated peptide
  VARIANT (1)..(17): Xaa = Any Amino Acid
ACEXFCAXNPACXTXGC

SEQ ID NO: 12097 - protein, 17 aa, Artificial Sequence
  Synthetically generated peptide
  VARIANT (1)..(17): Xaa = Any Amino Acid
ACEXFCAXNPACXTGXC

SEQ ID NO: 12098 - protein, 16 aa, Artificial Sequence
  Synthetically generated peptide
  VARIANT (1)..(16): Xaa = Any Amino Acid
ACEXFCAXNPACTXGC

SEQ ID NO: 12099 - protein, 17 aa, Artificial Sequence
  Synthetically generated peptide
  VARIANT (1)..(17): Xaa = Any Amino Acid
ACEXFCAXNPACTXXGC

SEQ ID NO: 12100 - protein, 17 aa, Artificial Sequence
  Synthetically generated peptide
  VARIANT (1)..(17): Xaa = Any Amino Acid
ACEXFCAXNPACTXGXC

SEQ ID NO: 12101 - protein, 16 aa, Artificial Sequence
  Synthetically generated peptide
  VARIANT (1)..(16): Xaa = Any Amino Acid
ACEXFCAXNPACTGXC

SEQ ID NO: 12102 - protein, 17 aa, Artificial Sequence
  Synthetically generated peptide
  VARIANT (1)..(17): Xaa = Any Amino Acid
ACEXFCAXNPACTGXXC

SEQ ID NO: 12103 - protein, 15 aa, Artificial Sequence
  Synthetically generated peptide
  VARIANT (1)..(15): Xaa = Any Amino Acid
ACEXFCANXPACTGC

SEQ ID NO: 12104 - protein, 16 aa, Artificial Sequence
  Synthetically generated peptide
  VARIANT (1)..(16): Xaa = Any Amino Acid
ACEXFCANXXPACTGC

SEQ ID NO: 12105 - protein, 17 aa, Artificial Sequence
  Synthetically generated peptide
  VARIANT (1)..(17): Xaa = Any Amino Acid
ACEXFCANXXXPACTGC

SEQ ID NO: 12106 - protein, 17 aa, Artificial Sequence
  Synthetically generated peptide
  VARIANT (1)..(17): Xaa = Any Amino Acid
ACEXFCANXXPXACTGC

SEQ ID NO: 12107 - protein, 17 aa, Artificial Sequence
  Synthetically generated peptide
  VARIANT (1)..(17): Xaa = Any Amino Acid
ACEXFCANXXPAXCTGC

SEQ ID NO: 12108 - protein, 17 aa, Artificial Sequence
  Synthetically generated peptide
  VARIANT (1)..(17): Xaa = Any Amino Acid
ACEXFCANXXPACXTGC

SEQ ID NO: 12109 - protein, 17 aa, Artificial Sequence
  Synthetically generated peptide
  VARIANT (1)..(17): Xaa = Any Amino Acid
ACEXFCANXXPACTXGC

SEQ ID NO: 12110 - protein, 17 aa, Artificial Sequence
  Synthetically generated peptide
  VARIANT (1)..(17): Xaa = Any Amino Acid
ACEXFCANXXPACTGXC

SEQ ID NO: 12111 - protein, 16 aa, Artificial Sequence
  Synthetically generated peptide
  VARIANT (1)..(16): Xaa = Any Amino Acid
ACEXFCANXPXACTGC

SEQ ID NO: 12112 - protein, 17 aa, Artificial Sequence
  Synthetically generated peptide
  VARIANT (1)..(17): Xaa = Any Amino Acid
ACEXFCANXPXXACTGC

SEQ ID NO: 12113 - protein, 17 aa, Artificial Sequence
  Synthetically generated peptide
  VARIANT (1)..(17): Xaa = Any Amino Acid
ACEXFCANXPXAXCTGC

SEQ ID NO: 12114 - protein, 17 aa, Artificial Sequence
  Synthetically generated peptide
  VARIANT (1)..(17): Xaa = Any Amino Acid
ACEXFCANXPXACXTGC

SEQ ID NO: 12115 - protein, 17 aa, Artificial Sequence
  Synthetically generated peptide
  VARIANT (1)..(17): Xaa = Any Amino Acid
ACEXFCANXPXACTXGC

SEQ ID NO: 12116 - protein, 17 aa, Artificial Sequence
  Synthetically generated peptide
  VARIANT (1)..(17): Xaa = Any Amino Acid
ACEXFCANXPXACTGXC

SEQ ID NO: 12117 - protein, 16 aa, Artificial Sequence
  Synthetically generated peptide
  VARIANT (1)..(16): Xaa = Any Amino Acid
ACEXFCANXPAXCTGC

SEQ ID NO: 12118 - protein, 17 aa, Artificial Sequence
  Synthetically generated peptide
  VARIANT (1)..(17): Xaa = Any Amino Acid
ACEXFCANXPAXXCTGC

SEQ ID NO: 12119 - protein, 17 aa, Artificial Sequence
  Synthetically generated peptide
  VARIANT (1)..(17): Xaa = Any Amino Acid
ACEXFCANXPAXCXTGC

SEQ ID NO: 12120 - protein, 17 aa, Artificial Sequence
  Synthetically generated peptide
  VARIANT (1)..(17): Xaa = Any Amino Acid
ACEXFCANXPAXCTXGC

SEQ ID NO: 12121 - protein, 17 aa, Artificial Sequence
  Synthetically generated peptide
  VARIANT (1)..(17): Xaa = Any Amino Acid
ACEXFCANXPAXCTGXC

SEQ ID NO: 12122 - protein, 16 aa, Artificial Sequence
  Synthetically generated peptide
  VARIANT (1)..(16): Xaa = Any Amino Acid
ACEXFCANXPACXTGC

SEQ ID NO: 12123 - protein, 17 aa, Artificial Sequence
  Synthetically generated peptide
  VARIANT (1)..(17): Xaa = Any Amino Acid
ACEXFCANXPACXXTGC

SEQ ID NO: 12124 - protein, 17 aa, Artificial Sequence
  Synthetically generated peptide
  VARIANT (1)..(17): Xaa = Any Amino Acid
ACEXFCANXPACXTXGC

SEQ ID NO: 12125 - protein, 17 aa, Artificial Sequence
  Synthetically generated peptide
  VARIANT (1)..(17): Xaa = Any Amino Acid
ACEXFCANXPACXTGXC

SEQ ID NO: 12126 - protein, 16 aa, Artificial Sequence
  Synthetically generated peptide
  VARIANT (1)..(16): Xaa = Any Amino Acid
ACEXFCANXPACTXGC

SEQ ID NO: 12127 - protein, 17 aa, Artificial Sequence
  Synthetically generated peptide
  VARIANT (1)..(17): Xaa = Any Amino Acid
ACEXFCANXPACTXXGC

SEQ ID NO: 12128 - protein, 17 aa, Artificial Sequence
  Synthetically generated peptide
  VARIANT (1)..(17): Xaa = Any Amino Acid
ACEXFCANXPACTXGXC

SEQ ID NO: 12129 - protein, 16 aa, Artificial Sequence
  Synthetically generated peptide
  VARIANT (1)..(16): Xaa = Any Amino Acid
ACEXFCANXPACTGXC

SEQ ID NO: 12130 - protein, 17 aa, Artificial Sequence
  Synthetically generated peptide
  VARIANT (1)..(17): Xaa = Any Amino Acid
ACEXFCANXPACTGXXC

SEQ ID NO: 12131 - protein, 15 aa, Artificial Sequence
  Synthetically generated peptide
  VARIANT (1)..(15): Xaa = Any Amino Acid
ACEXFCANPXACTGC

SEQ ID NO: 12132 - protein, 16 aa, Artificial Sequence
  Synthetically generated peptide
  VARIANT (1)..(16): Xaa = Any Amino Acid
ACEXFCANPXXACTGC

SEQ ID NO: 12133 - protein, 17 aa, Artificial Sequence
  Synthetically generated peptide
  VARIANT (1)..(17): Xaa = Any Amino Acid
ACEXFCANPXXXACTGC

SEQ ID NO: 12134 - protein, 17 aa, Artificial Sequence
  Synthetically generated peptide
  VARIANT (1)..(17): Xaa = Any Amino Acid
ACEXFCANPXXAXCTGC

SEQ ID NO: 12135 - protein, 17 aa, Artificial Sequence
  Synthetically generated peptide
  VARIANT (1)..(17): Xaa = Any Amino Acid
ACEXFCANPXXACXTGC

SEQ ID NO: 12136 - protein, 17 aa, Artificial Sequence
  Synthetically generated peptide
  VARIANT (1)..(17): Xaa = Any Amino Acid
ACEXFCANPXXACTXGC

SEQ ID NO: 12137 - protein, 17 aa, Artificial Sequence
  Synthetically generated peptide
  VARIANT (1)..(17): Xaa = Any Amino Acid
ACEXFCANPXXACTGXC

SEQ ID NO: 12138 - protein, 16 aa, Artificial Sequence
  Synthetically generated peptide
  VARIANT (1)..(16): Xaa = Any Amino Acid
ACEXFCANPXAXCTGC

SEQ ID NO: 12139 - protein, 17 aa, Artificial Sequence
  Synthetically generated peptide
  VARIANT (1)..(17): Xaa = Any Amino Acid
ACEXFCANPXAXXCTGC

SEQ ID NO: 12140 - protein, 17 aa, Artificial Sequence
  Synthetically generated peptide
  VARIANT (1)..(17): Xaa = Any Amino Acid
ACEXFCANPXAXCXTGC

SEQ ID NO: 12141 - protein, 17 aa, Artificial Sequence
  Synthetically generated peptide
  VARIANT (1)..(17): Xaa = Any Amino Acid
ACEXFCANPXAXCTXGC

SEQ ID NO: 12142 - protein, 17 aa, Artificial Sequence
  Synthetically generated peptide
  VARIANT (1)..(17): Xaa = Any Amino Acid
ACEXFCANPXAXCTGXC

SEQ ID NO: 12143 - protein, 16 aa, Artificial Sequence
  Synthetically generated peptide
  VARIANT (1)..(16): Xaa = Any Amino Acid
ACEXFCANPXACXTGC

SEQ ID NO: 12144 - protein, 17 aa, Artificial Sequence
  Synthetically generated peptide
  VARIANT (1)..(17): Xaa = Any Amino Acid
ACEXFCANPXACXXTGC

SEQ ID NO: 12145 - protein, 17 aa, Artificial Sequence
  Synthetically generated peptide
  VARIANT (1)..(17): Xaa = Any Amino Acid
ACEXFCANPXACXTXGC

SEQ ID NO: 12146 - protein, 17 aa, Artificial Sequence
  Synthetically generated peptide
  VARIANT (1)..(17): Xaa = Any Amino Acid
ACEXFCANPXACXTGXC

SEQ ID NO: 12147 - protein, 16 aa, Artificial Sequence
  Synthetically generated peptide
  VARIANT (1)..(16): Xaa = Any Amino Acid
ACEXFCANPXACTXGC

SEQ ID NO: 12148 - protein, 17 aa, Artificial Sequence
  Synthetically generated peptide
  VARIANT (1)..(17): Xaa = Any Amino Acid
ACEXFCANPXACTXXGC

SEQ ID NO: 12149 - protein, 17 aa, Artificial Sequence
  Synthetically generated peptide
  VARIANT (1)..(17): Xaa = Any Amino Acid
ACEXFCANPXACTXGXC

SEQ ID NO: 12150 - protein, 16 aa, Artificial Sequence
  Synthetically generated peptide
  VARIANT (1)..(16): Xaa = Any Amino Acid
ACEXFCANPXACTGXC

SEQ ID NO: 12151 - protein, 17 aa, Artificial Sequence
  Synthetically generated peptide
  VARIANT (1)..(17): Xaa = Any Amino Acid
ACEXFCANPXACTGXXC

SEQ ID NO: 12152 - protein, 15 aa, Artificial Sequence
  Synthetically generated peptide
  VARIANT (1)..(15): Xaa = Any Amino Acid
ACEXFCANPAXCTGC

SEQ ID NO: 12153 - protein, 16 aa, Artificial Sequence
  Synthetically generated peptide
  VARIANT (1)..(16): Xaa = Any Amino Acid
ACEXFCANPAXXCTGC

SEQ ID NO: 12154 - protein, 17 aa, Artificial Sequence
  Synthetically generated peptide
  VARIANT (1)..(17): Xaa = Any Amino Acid
ACEXFCANPAXXXCTGC

SEQ ID NO: 12155 - protein, 17 aa, Artificial Sequence
  Synthetically generated peptide
  VARIANT (1)..(17): Xaa = Any Amino Acid
ACEXFCANPAXXCXTGC

SEQ ID NO: 12156 - protein, 17 aa, Artificial Sequence
  Synthetically generated peptide
  VARIANT (1)..(17): Xaa = Any Amino Acid
ACEXFCANPAXXCTXGC

SEQ ID NO: 12157 - protein, 17 aa, Artificial Sequence
  Synthetically generated peptide
  VARIANT (1)..(17): Xaa = Any Amino Acid
ACEXFCANPAXXCTGXC

SEQ ID NO: 12158 - protein, 16 aa, Artificial Sequence
  Synthetically generated peptide
  VARIANT (1)..(16): Xaa = Any Amino Acid
ACEXFCANPAXCXTGC

SEQ ID NO: 12159 - protein, 17 aa, Artificial Sequence
  Synthetically generated peptide
  VARIANT (1)..(17): Xaa = Any Amino Acid
ACEXFCANPAXCXXTGC

SEQ ID NO: 12160 - protein, 17 aa, Artificial Sequence
  Synthetically generated peptide
  VARIANT (1)..(17): Xaa = Any Amino Acid
ACEXFCANPAXCXTXGC

SEQ ID NO: 12161 - protein, 17 aa, Artificial Sequence
  Synthetically generated peptide
  VARIANT (1)..(17): Xaa = Any Amino Acid
ACEXFCANPAXCXTGXC

SEQ ID NO: 12162 - protein, 16 aa, Artificial Sequence
  Synthetically generated peptide
  VARIANT (1)..(16): Xaa = Any Amino Acid
ACEXFCANPAXCTXGC

SEQ ID NO: 12163 - protein, 17 aa, Artificial Sequence
  Synthetically generated peptide
  VARIANT (1)..(17): Xaa = Any Amino Acid
ACEXFCANPAXCTXXGC

SEQ ID NO: 12164 - protein, 17 aa, Artificial Sequence
  Synthetically generated peptide
  VARIANT (1)..(17): Xaa = Any Amino Acid
ACEXFCANPAXCTXGXC

SEQ ID NO: 12165 - protein, 16 aa, Artificial Sequence
  Synthetically generated peptide
  VARIANT (1)..(16): Xaa = Any Amino Acid
ACEXFCANPAXCTGXC

SEQ ID NO: 12166 - protein, 17 aa, Artificial Sequence
  Synthetically generated peptide
  VARIANT (1)..(17): Xaa = Any Amino Acid
ACEXFCANPAXCTGXXC

SEQ ID NO: 12167 - protein, 15 aa, Artificial Sequence
  Synthetically generated peptide
  VARIANT (1)..(15): Xaa = Any Amino Acid
ACEXFCANPACXTGC

SEQ ID NO: 12168 - protein, 16 aa, Artificial Sequence
  Synthetically generated peptide
  VARIANT (1)..(16): Xaa = Any Amino Acid
ACEXFCANPACXXTGC

SEQ ID NO: 12169 - protein, 17 aa, Artificial Sequence
  Synthetically generated peptide
  VARIANT (1)..(17): Xaa = Any Amino Acid
ACEXFCANPACXXXTGC

SEQ ID NO: 12170 - protein, 17 aa, Artificial Sequence
  Synthetically generated peptide
  VARIANT (1)..(17): Xaa = Any Amino Acid
ACEXFCANPACXXTXGC

SEQ ID NO: 12171 - protein, 17 aa, Artificial Sequence
  Synthetically generated peptide
  VARIANT (1)..(17): Xaa = Any Amino Acid
ACEXFCANPACXXTGXC

SEQ ID NO: 12172 - protein, 16 aa, Artificial Sequence
  Synthetically generated peptide
  VARIANT (1)..(16): Xaa = Any Amino Acid
ACEXFCANPACXTXGC

SEQ ID NO: 12173 - protein, 17 aa, Artificial Sequence
  Synthetically generated peptide
  VARIANT (1)..(17): Xaa = Any Amino Acid
ACEXFCANPACXTXXGC

SEQ ID NO: 12174 - protein, 17 aa, Artificial Sequence
  Synthetically generated peptide
  VARIANT (1)..(17): Xaa = Any Amino Acid
ACEXFCANPACXTXGXC

SEQ ID NO: 12175 - protein, 16 aa, Artificial Sequence
  Synthetically generated peptide
  VARIANT (1)..(16): Xaa = Any Amino Acid
ACEXFCANPACXTGXC

SEQ ID NO: 12176 - protein, 17 aa, Artificial Sequence
  Synthetically generated peptide
  VARIANT (1)..(17): Xaa = Any Amino Acid
ACEXFCANPACXTGXXC

SEQ ID NO: 12177 - protein, 15 aa, Artificial Sequence
  Synthetically generated peptide
  VARIANT (1)..(15): Xaa = Any Amino Acid
ACEXFCANPACTXGC

SEQ ID NO: 12178 - protein, 16 aa, Artificial Sequence
  Synthetically generated peptide
  VARIANT (1)..(16): Xaa = Any Amino Acid
ACEXFCANPACTXXGC

SEQ ID NO: 12179 - protein, 17 aa, Artificial Sequence
  Synthetically generated peptide
  VARIANT (1)..(17): Xaa = Any Amino Acid
ACEXFCANPACTXXXGC

SEQ ID NO: 12180 - protein, 17 aa, Artificial Sequence
  Synthetically generated peptide
  VARIANT (1)..(17): Xaa = Any Amino Acid
ACEXFCANPACTXXGXC

SEQ ID NO: 12181 - protein, 16 aa, Artificial Sequence
  Synthetically generated peptide
  VARIANT (1)..(16): Xaa = Any Amino Acid
ACEXFCANPACTXGXC

SEQ ID NO: 12182 - protein, 17 aa, Artificial Sequence
  Synthetically generated peptide
  VARIANT (1)..(17): Xaa = Any Amino Acid
ACEXFCANPACTXGXXC

SEQ ID NO: 12183 - protein, 15 aa, Artificial Sequence
  Synthetically generated peptide
  VARIANT (1)..(15): Xaa = Any Amino Acid
ACEXFCANPACTGXC

SEQ ID NO: 12184 - protein, 16 aa, Artificial Sequence
  Synthetically generated peptide
  VARIANT (1)..(16): Xaa = Any Amino Acid
ACEXFCANPACTGXXC

SEQ ID NO: 12185 - protein, 17 aa, Artificial Sequence
  Synthetically generated peptide
  VARIANT (1)..(17): Xaa = Any Amino Acid
ACEXFCANPACTGXXXC

SEQ ID NO: 12186 - protein, 14 aa, Artificial Sequence
  Synthetically generated peptide
  VARIANT (1)..(14): Xaa = Any Amino Acid
ACEFXCANPACTGC

SEQ ID NO: 12187 - protein, 15 aa, Artificial Sequence
  Synthetically generated peptide
  VARIANT (1)..(15): Xaa = Any Amino Acid
ACEFXXCANPACTGC

SEQ ID NO: 12188 - protein, 16 aa, Artificial Sequence
  Synthetically generated peptide
  VARIANT (1)..(16): Xaa = Any Amino Acid
ACEFXXXCANPACTGC

SEQ ID NO: 12189 - protein, 17 aa, Artificial Sequence
  Synthetically generated peptide
  VARIANT (1)..(17): Xaa = Any Amino Acid
ACEFXXXXCANPACTGC

SEQ ID NO: 12190 - protein, 17 aa, Artificial Sequence
  Synthetically generated peptide
  VARIANT (1)..(17): Xaa = Any Amino Acid
ACEFXXXCAXNPACTGC

SEQ ID NO: 12191 - protein, 17 aa, Artificial Sequence
  Synthetically generated peptide
  VARIANT (1)..(17): Xaa = Any Amino Acid
ACEFXXXCANXPACTGC

SEQ ID NO: 12192 - protein, 17 aa, Artificial Sequence
  Synthetically generated peptide
  VARIANT (1)..(17): Xaa = Any Amino Acid
ACEFXXXCANPXACTGC

SEQ ID NO: 12193 - protein, 17 aa, Artificial Sequence
  Synthetically generated peptide
  VARIANT (1)..(17): Xaa = Any Amino Acid
ACEFXXXCANPAXCTGC

SEQ ID NO: 12194 - protein, 17 aa, Artificial Sequence
  Synthetically generated peptide
  VARIANT (1)..(17): Xaa = Any Amino Acid
ACEFXXXCANPACXTGC

SEQ ID NO: 12195 - protein, 17 aa, Artificial Sequence
  Synthetically generated peptide
  VARIANT (1)..(17): Xaa = Any Amino Acid
ACEFXXXCANPACTXGC

SEQ ID NO: 12196 - protein, 17 aa, Artificial Sequence
  Synthetically generated peptide
  VARIANT (1)..(17): Xaa = Any Amino Acid
ACEFXXXCANPACTGXC

SEQ ID NO: 12197 - protein, 16 aa, Artificial Sequence
  Synthetically generated peptide
  VARIANT (1)..(16): Xaa = Any Amino Acid
ACEFXXCAXNPACTGC

SEQ ID NO: 12198 - protein, 17 aa, Artificial Sequence
  Synthetically generated peptide
  VARIANT (1)..(17): Xaa = Any Amino Acid
ACEFXXCAXXNPACTGC

SEQ ID NO: 12199 - protein, 17 aa, Artificial Sequence
  Synthetically generated peptide
  VARIANT (1)..(17): Xaa = Any Amino Acid
ACEFXXCAXNXPACTGC

SEQ ID NO: 12200 - protein, 17 aa, Artificial Sequence
  Synthetically generated peptide
  VARIANT (1)..(17): Xaa = Any Amino Acid
ACEFXXCAXNPXACTGC

SEQ ID NO: 12201 - protein, 17 aa, Artificial Sequence
  Synthetically generated peptide
  VARIANT (1)..(17): Xaa = Any Amino Acid
ACEFXXCAXNPAXCTGC

SEQ ID NO: 12202 - protein, 17 aa, Artificial Sequence
  Synthetically generated peptide
  VARIANT (1)..(17): Xaa = Any Amino Acid
ACEFXXCAXNPACXTGC

SEQ ID NO: 12203 - protein, 17 aa, Artificial Sequence
  Synthetically generated peptide
  VARIANT (1)..(17): Xaa = Any Amino Acid
ACEFXXCAXNPACTXGC

SEQ ID NO: 12204 - protein, 17 aa, Artificial Sequence
  Synthetically generated peptide
  VARIANT (1)..(17): Xaa = Any Amino Acid
ACEFXXCAXNPACTGXC

SEQ ID NO: 12205 - protein, 16 aa, Artificial Sequence
  Synthetically generated peptide
  VARIANT (1)..(16): Xaa = Any Amino Acid
ACEFXXCANXPACTGC

SEQ ID NO: 12206 - protein, 17 aa, Artificial Sequence
  Synthetically generated peptide
  VARIANT (1)..(17): Xaa = Any Amino Acid
ACEFXXCANXXPACTGC

SEQ ID NO: 12207 - protein, 17 aa, Artificial Sequence
  Synthetically generated peptide
  VARIANT (1)..(17): Xaa = Any Amino Acid
ACEFXXCANXPXACTGC

SEQ ID NO: 12208 - protein, 17 aa, Artificial Sequence
  Synthetically generated peptide
  VARIANT (1)..(17): Xaa = Any Amino Acid
ACEFXXCANXPAXCTGC

SEQ ID NO: 12209 - protein, 17 aa, Artificial Sequence
  Synthetically generated peptide
  VARIANT (1)..(17): Xaa = Any Amino Acid
ACEFXXCANXPACXTGC

SEQ ID NO: 12210 - protein, 17 aa, Artificial Sequence
  Synthetically generated peptide
  VARIANT (1)..(17): Xaa = Any Amino Acid
ACEFXXCANXPACTXGC

SEQ ID NO: 12211 - protein, 17 aa, Artificial Sequence
  Synthetically generated peptide
  VARIANT (1)..(17): Xaa = Any Amino Acid
ACEFXXCANXPACTGXC

SEQ ID NO: 12212 - protein, 16 aa, Artificial Sequence
  Synthetically generated peptide
  VARIANT (1)..(16): Xaa = Any Amino Acid
ACEFXXCANPXACTGC

SEQ ID NO: 12213 - protein, 17 aa, Artificial Sequence
  Synthetically generated peptide
  VARIANT (1)..(17): Xaa = Any Amino Acid
ACEFXXCANPXXACTGC

SEQ ID NO: 12214 - protein, 17 aa, Artificial Sequence
  Synthetically generated peptide
  VARIANT (1)..(17): Xaa = Any Amino Acid
ACEFXXCANPXAXCTGC

SEQ ID NO: 12215 - protein, 17 aa, Artificial Sequence
  Synthetically generated peptide
  VARIANT (1)..(17): Xaa = Any Amino Acid
ACEFXXCANPXACXTGC

SEQ ID NO: 12216 - protein, 17 aa, Artificial Sequence
  Synthetically generated peptide
  VARIANT (1)..(17): Xaa = Any Amino Acid
ACEFXXCANPXACTXGC

SEQ ID NO: 12217 - protein, 17 aa, Artificial Sequence
  Synthetically generated peptide
  VARIANT (1)..(17): Xaa = Any Amino Acid
ACEFXXCANPXACTGXC

SEQ ID NO: 12218 - protein, 16 aa, Artificial Sequence
  Synthetically generated peptide
  VARIANT (1)..(16): Xaa = Any Amino Acid
ACEFXXCANPAXCTGC

SEQ ID NO: 12219 - protein, 17 aa, Artificial Sequence
  Synthetically generated peptide
  VARIANT (1)..(17): Xaa = Any Amino Acid
ACEFXXCANPAXXCTGC

SEQ ID NO: 12220 - protein, 17 aa, Artificial Sequence
  Synthetically generated peptide
  VARIANT (1)..(17): Xaa = Any Amino Acid
ACEFXXCANPAXCXTGC

SEQ ID NO: 12221 - protein, 17 aa, Artificial Sequence
  Synthetically generated peptide
  VARIANT (1)..(17): Xaa = Any Amino Acid
ACEFXXCANPAXCTXGC

SEQ ID NO: 12222 - protein, 17 aa, Artificial Sequence
  Synthetically generated peptide
  VARIANT (1)..(17): Xaa = Any Amino Acid
ACEFXXCANPAXCTGXC

SEQ ID NO: 12223 - protein, 16 aa, Artificial Sequence
  Synthetically generated peptide
  VARIANT (1)..(16): Xaa = Any Amino Acid
ACEFXXCANPACXTGC

SEQ ID NO: 12224 - protein, 17 aa, Artificial Sequence
  Synthetically generated peptide
  VARIANT (1)..(17): Xaa = Any Amino Acid
ACEFXXCANPACXXTGC

SEQ ID NO: 12225 - protein, 17 aa, Artificial Sequence
  Synthetically generated peptide
  VARIANT (1)..(17): Xaa = Any Amino Acid
ACEFXXCANPACXTXGC

SEQ ID NO: 12226 - protein, 17 aa, Artificial Sequence
  Synthetically generated peptide
  VARIANT (1)..(17): Xaa = Any Amino Acid
ACEFXXCANPACXTGXC

SEQ ID NO: 12227 - protein, 16 aa, Artificial Sequence
  Synthetically generated peptide
  VARIANT (1)..(16): Xaa = Any Amino Acid
ACEFXXCANPACTXGC

SEQ ID NO: 12228 - protein, 17 aa, Artificial Sequence
  Synthetically generated peptide
  VARIANT (1)..(17): Xaa = Any Amino Acid
ACEFXXCANPACTXXGC

SEQ ID NO: 12229 - protein, 17 aa, Artificial Sequence
  Synthetically generated peptide
  VARIANT (1)..(17): Xaa = Any Amino Acid
ACEFXXCANPACTXGXC

SEQ ID NO: 12230 - protein, 16 aa, Artificial Sequence
  Synthetically generated peptide
  VARIANT (1)..(16): Xaa = Any Amino Acid
ACEFXXCANPACTGXC

SEQ ID NO: 12231 - protein, 17 aa, Artificial Sequence
  Synthetically generated peptide
  VARIANT (1)..(17): Xaa = Any Amino Acid
ACEFXXCANPACTGXXC

SEQ ID NO: 12232 - protein, 15 aa, Artificial Sequence
  Synthetically generated peptide
  VARIANT (1)..(15): Xaa = Any Amino Acid
ACEFXCAXNPACTGC

SEQ ID NO: 12233 - protein, 16 aa, Artificial Sequence
  Synthetically generated peptide
  VARIANT (1)..(16): Xaa = Any Amino Acid
ACEFXCAXXNPACTGC

SEQ ID NO: 12234 - protein, 17 aa, Artificial Sequence
  Synthetically generated peptide
  VARIANT (1)..(17): Xaa = Any Amino Acid
ACEFXCAXXXNPACTGC

SEQ ID NO: 12235 - protein, 17 aa, Artificial Sequence
  Synthetically generated peptide
  VARIANT (1)..(17): Xaa = Any Amino Acid
ACEFXCAXXNXPACTGC

SEQ ID NO: 12236 - protein, 17 aa, Artificial Sequence
  Synthetically generated peptide
  VARIANT (1)..(17): Xaa = Any Amino Acid
ACEFXCAXXNPXACTGC

SEQ ID NO: 12237 - protein, 17 aa, Artificial Sequence
  Synthetically generated peptide
  VARIANT (1)..(17): Xaa = Any Amino Acid
ACEFXCAXXNPAXCTGC

SEQ ID NO: 12238 - protein, 17 aa, Artificial Sequence
  Synthetically generated peptide
  VARIANT (1)..(17): Xaa = Any Amino Acid
ACEFXCAXXNPACXTGC

SEQ ID NO: 12239 - protein, 17 aa, Artificial Sequence
  Synthetically generated peptide
  VARIANT (1)..(17): Xaa = Any Amino Acid
ACEFXCAXXNPACTXGC

SEQ ID NO: 12240 - protein, 17 aa, Artificial Sequence
  Synthetically generated peptide
  VARIANT (1)..(17): Xaa = Any Amino Acid
ACEFXCAXXNPACTGXC

SEQ ID NO: 12241 - protein, 16 aa, Artificial Sequence
  Synthetically generated peptide
  VARIANT (1)..(16): Xaa = Any Amino Acid
ACEFXCAXNXPACTGC

SEQ ID NO: 12242 - protein, 17 aa, Artificial Sequence
  Synthetically generated peptide
  VARIANT (1)..(17): Xaa = Any Amino Acid
ACEFXCAXNXXPACTGC

SEQ ID NO: 12243 - protein, 17 aa, Artificial Sequence
  Synthetically generated peptide
  VARIANT (1)..(17): Xaa = Any Amino Acid
ACEFXCAXNXPXACTGC

SEQ ID NO: 12244 - protein, 17 aa, Artificial Sequence
  Synthetically generated peptide
  VARIANT (1)..(17): Xaa = Any Amino Acid
ACEFXCAXNXPAXCTGC

SEQ ID NO: 12245 - protein, 17 aa, Artificial Sequence
  Synthetically generated peptide
  VARIANT (1)..(17): Xaa = Any Amino Acid
ACEFXCAXNXPACXTGC

SEQ ID NO: 12246 - protein, 17 aa, Artificial Sequence
  Synthetically generated peptide
  VARIANT (1)..(17): Xaa = Any Amino Acid
ACEFXCAXNXPACTXGC

SEQ ID NO: 12247 - protein, 17 aa, Artificial Sequence
  Synthetically generated peptide
  VARIANT (1)..(17): Xaa = Any Amino Acid
ACEFXCAXNXPACTGXC

SEQ ID NO: 12248 - protein, 16 aa, Artificial Sequence
  Synthetically generated peptide
  VARIANT (1)..(16): Xaa = Any Amino Acid
ACEFXCAXNPXACTGC

SEQ ID NO: 12249 - protein, 17 aa, Artificial Sequence
  Synthetically generated peptide
  VARIANT (1)..(17): Xaa = Any Amino Acid
ACEFXCAXNPXXACTGC

SEQ ID NO: 12250 - protein, 17 aa, Artificial Sequence
  Synthetically generated peptide
  VARIANT (1)..(17): Xaa = Any Amino Acid
ACEFXCAXNPXAXCTGC

SEQ ID NO: 12251 - protein, 17 aa, Artificial Sequence
  Synthetically generated peptide
  VARIANT (1)..(17): Xaa = Any Amino Acid
ACEFXCAXNPXACXTGC

SEQ ID NO: 12252 - protein, 17 aa, Artificial Sequence
  Synthetically generated peptide
  VARIANT (1)..(17): Xaa = Any Amino Acid
ACEFXCAXNPXACTXGC

SEQ ID NO: 12253 - protein, 17 aa, Artificial Sequence
  Synthetically generated peptide
  VARIANT (1)..(17): Xaa = Any Amino Acid
ACEFXCAXNPXACTGXC

SEQ ID NO: 12254 - protein, 16 aa, Artificial Sequence
  Synthetically generated peptide
  VARIANT (1)..(16): Xaa = Any Amino Acid
ACEFXCAXNPAXCTGC

SEQ ID NO: 12255 - protein, 17 aa, Artificial Sequence
  Synthetically generated peptide
  VARIANT (1)..(17): Xaa = Any Amino Acid
ACEFXCAXNPAXXCTGC

SEQ ID NO: 12256 - protein, 17 aa, Artificial Sequence
  Synthetically generated peptide
  VARIANT (1)..(17): Xaa = Any Amino Acid
ACEFXCAXNPAXCXTGC

SEQ ID NO: 12257 - protein, 17 aa, Artificial Sequence
  Synthetically generated peptide
  VARIANT (1)..(17): Xaa = Any Amino Acid
ACEFXCAXNPAXCTXGC

SEQ ID NO: 12258 - protein, 17 aa, Artificial Sequence
  Synthetically generated peptide
  VARIANT (1)..(17): Xaa = Any Amino Acid
ACEFXCAXNPAXCTGXC

SEQ ID NO: 12259 - protein, 16 aa, Artificial Sequence
  Synthetically generated peptide
  VARIANT (1)..(16): Xaa = Any Amino Acid
ACEFXCAXNPACXTGC

SEQ ID NO: 12260 - protein, 17 aa, Artificial Sequence
  Synthetically generated peptide
  VARIANT (1)..(17): Xaa = Any Amino Acid
ACEFXCAXNPACXXTGC

SEQ ID NO: 12261 - protein, 17 aa, Artificial Sequence
  Synthetically generated peptide
  VARIANT (1)..(17): Xaa = Any Amino Acid
ACEFXCAXNPACXTXGC

SEQ ID NO: 12262 - protein, 17 aa, Artificial Sequence
  Synthetically generated peptide
  VARIANT (1)..(17): Xaa = Any Amino Acid
ACEFXCAXNPACXTGXC

SEQ ID NO: 12263 - protein, 16 aa, Artificial Sequence
  Synthetically generated peptide
  VARIANT (1)..(16): Xaa = Any Amino Acid
ACEFXCAXNPACTXGC

SEQ ID NO: 12264 - protein, 17 aa, Artificial Sequence
  Synthetically generated peptide
  VARIANT (1)..(17): Xaa = Any Amino Acid
ACEFXCAXNPACTXXGC

SEQ ID NO: 12265 - protein, 17 aa, Artificial Sequence
  Synthetically generated peptide
  VARIANT (1)..(17): Xaa = Any Amino Acid
ACEFXCAXNPACTXGXC

SEQ ID NO: 12266 - protein, 16 aa, Artificial Sequence
  Synthetically generated peptide
  VARIANT (1)..(16): Xaa = Any Amino Acid
ACEFXCAXNPACTGXC

SEQ ID NO: 12267 - protein, 17 aa, Artificial Sequence
  Synthetically generated peptide
  VARIANT (1)..(17): Xaa = Any Amino Acid
ACEFXCAXNPACTGXXC

SEQ ID NO: 12268 - protein, 15 aa, Artificial Sequence
  Synthetically generated peptide
  VARIANT (1)..(15): Xaa = Any Amino Acid
ACEFXCANXPACTGC

SEQ ID NO: 12269 - protein, 16 aa, Artificial Sequence
  Synthetically generated peptide
  VARIANT (1)..(16): Xaa = Any Amino Acid
ACEFXCANXXPACTGC

SEQ ID NO: 12270 - protein, 17 aa, Artificial Sequence
  Synthetically generated peptide
  VARIANT (1)..(17): Xaa = Any Amino Acid
ACEFXCANXXXPACTGC

SEQ ID NO: 12271 - protein, 17 aa, Artificial Sequence
  Synthetically generated peptide
  VARIANT (1)..(17): Xaa = Any Amino Acid
ACEFXCANXXPXACTGC

SEQ ID NO: 12272 - protein, 17 aa, Artificial Sequence
  Synthetically generated peptide
  VARIANT (1)..(17): Xaa = Any Amino Acid
ACEFXCANXXPAXCTGC

SEQ ID NO: 12273 - protein, 17 aa, Artificial Sequence
  Synthetically generated peptide
  VARIANT (1)..(17): Xaa = Any Amino Acid
ACEFXCANXXPACXTGC

SEQ ID NO: 12274 - protein, 17 aa, Artificial Sequence
  Synthetically generated peptide
  VARIANT (1)..(17): Xaa = Any Amino Acid
ACEFXCANXXPACTXGC

SEQ ID NO: 12275 - protein, 17 aa, Artificial Sequence
  Synthetically generated peptide
  VARIANT (1)..(17): Xaa = Any Amino Acid
ACEFXCANXXPACTGXC

SEQ ID NO: 12276 - protein, 16 aa, Artificial Sequence
  Synthetically generated peptide
  VARIANT (1)..(16): Xaa = Any Amino Acid
ACEFXCANXPXACTGC

SEQ ID NO: 12277 - protein, 17 aa, Artificial Sequence
  Synthetically generated peptide
  VARIANT (1)..(17): Xaa = Any Amino Acid
ACEFXCANXPXXACTGC

SEQ ID NO: 12278 - protein, 17 aa, Artificial Sequence
  Synthetically generated peptide
  VARIANT (1)..(17): Xaa = Any Amino Acid
ACEFXCANXPXAXCTGC

SEQ ID NO: 12279 - protein, 17 aa, Artificial Sequence
  Synthetically generated peptide
  VARIANT (1)..(17): Xaa = Any Amino Acid
ACEFXCANXPXACXTGC

SEQ ID NO: 12280 - protein, 17 aa, Artificial Sequence
  Synthetically generated peptide
  VARIANT (1)..(17): Xaa = Any Amino Acid
ACEFXCANXPXACTXGC

SEQ ID NO: 12281 - protein, 17 aa, Artificial Sequence
  Synthetically generated peptide
  VARIANT (1)..(17): Xaa = Any Amino Acid
ACEFXCANXPXACTGXC

SEQ ID NO: 12282 - protein, 16 aa, Artificial Sequence
  Synthetically generated peptide
  VARIANT (1)..(16): Xaa = Any Amino Acid
ACEFXCANXPAXCTGC

SEQ ID NO: 12283 - protein, 17 aa, Artificial Sequence
  Synthetically generated peptide
  VARIANT (1)..(17): Xaa = Any Amino Acid
ACEFXCANXPAXXCTGC

SEQ ID NO: 12284 - protein, 17 aa, Artificial Sequence
  Synthetically generated peptide
  VARIANT (1)..(17): Xaa = Any Amino Acid
ACEFXCANXPAXCXTGC

SEQ ID NO: 12285 - protein, 17 aa, Artificial Sequence
  Synthetically generated peptide
  VARIANT (1)..(17): Xaa = Any Amino Acid
ACEFXCANXPAXCTXGC

SEQ ID NO: 12286 - protein, 17 aa, Artificial Sequence
  Synthetically generated peptide
  VARIANT (1)..(17): Xaa = Any Amino Acid
ACEFXCANXPAXCTGXC

SEQ ID NO: 12287 - protein, 16 aa, Artificial Sequence
  Synthetically generated peptide
  VARIANT (1)..(16): Xaa = Any Amino Acid
ACEFXCANXPACXTGC

SEQ ID NO: 12288 - protein, 17 aa, Artificial Sequence
  Synthetically generated peptide
  VARIANT (1)..(17): Xaa = Any Amino Acid
ACEFXCANXPACXXTGC

SEQ ID NO: 12289 - protein, 17 aa, Artificial Sequence
  Synthetically generated peptide
  VARIANT (1)..(17): Xaa = Any Amino Acid
ACEFXCANXPACXTXGC

SEQ ID NO: 12290 - protein, 17 aa, Artificial Sequence
  Synthetically generated peptide
  VARIANT (1)..(17): Xaa = Any Amino Acid
ACEFXCANXPACXTGXC

SEQ ID NO: 12291 - protein, 16 aa, Artificial Sequence
  Synthetically generated peptide
  VARIANT (1)..(16): Xaa = Any Amino Acid
ACEFXCANXPACTXGC

SEQ ID NO: 12292 - protein, 17 aa, Artificial Sequence
  Synthetically generated peptide
  VARIANT (1)..(17): Xaa = Any Amino Acid
ACEFXCANXPACTXXGC

SEQ ID NO: 12293 - protein, 17 aa, Artificial Sequence
  Synthetically generated peptide
  VARIANT (1)..(17): Xaa = Any Amino Acid
ACEFXCANXPACTXGXC

SEQ ID NO: 12294 - protein, 16 aa, Artificial Sequence
  Synthetically generated peptide
  VARIANT (1)..(16): Xaa = Any Amino Acid
ACEFXCANXPACTGXC

SEQ ID NO: 12295 - protein, 17 aa, Artificial Sequence
  Synthetically generated peptide
  VARIANT (1)..(17): Xaa = Any Amino Acid
ACEFXCANXPACTGXXC

SEQ ID NO: 12296 - protein, 15 aa, Artificial Sequence
  Synthetically generated peptide
  VARIANT (1)..(15): Xaa = Any Amino Acid
ACEFXCANPXACTGC

SEQ ID NO: 12297 - protein, 16 aa, Artificial Sequence
  Synthetically generated peptide
  VARIANT (1)..(16): Xaa = Any Amino Acid
ACEFXCANPXXACTGC

SEQ ID NO: 12298 - protein, 17 aa, Artificial Sequence
  Synthetically generated peptide
  VARIANT (1)..(17): Xaa = Any Amino Acid
ACEFXCANPXXXACTGC

SEQ ID NO: 12299 - protein, 17 aa, Artificial Sequence
  Synthetically generated peptide
  VARIANT (1)..(17): Xaa = Any Amino Acid
ACEFXCANPXXAXCTGC

SEQ ID NO: 12300 - protein, 17 aa, Artificial Sequence
  Synthetically generated peptide
  VARIANT (1)..(17): Xaa = Any Amino Acid
ACEFXCANPXXACXTGC

SEQ ID NO: 12301 - protein, 17 aa, Artificial Sequence
  Synthetically generated peptide
  VARIANT (1)..(17): Xaa = Any Amino Acid
ACEFXCANPXXACTXGC

SEQ ID NO: 12302 - protein, 17 aa, Artificial Sequence
  Synthetically generated peptide
  VARIANT (1)..(17): Xaa = Any Amino Acid
ACEFXCANPXXACTGXC

SEQ ID NO: 12303 - protein, 16 aa, Artificial Sequence
  Synthetically generated peptide
  VARIANT (1)..(16): Xaa = Any Amino Acid
ACEFXCANPXAXCTGC

SEQ ID NO: 12304 - protein, 17 aa, Artificial Sequence
  Synthetically generated peptide
  VARIANT (1)..(17): Xaa = Any Amino Acid
ACEFXCANPXAXXCTGC

SEQ ID NO: 12305 - protein, 17 aa, Artificial Sequence
  Synthetically generated peptide
  VARIANT (1)..(17): Xaa = Any Amino Acid
ACEFXCANPXAXCXTGC

SEQ ID NO: 12306 - protein, 17 aa, Artificial Sequence
  Synthetically generated peptide
  VARIANT (1)..(17): Xaa = Any Amino Acid
ACEFXCANPXAXCTXGC

SEQ ID NO: 12307 - protein, 17 aa, Artificial Sequence
  Synthetically generated peptide
  VARIANT (1)..(17): Xaa = Any Amino Acid
ACEFXCANPXAXCTGXC

SEQ ID NO: 12308 - protein, 16 aa, Artificial Sequence
  Synthetically generated peptide
  VARIANT (1)..(16): Xaa = Any Amino Acid
ACEFXCANPXACXTGC

SEQ ID NO: 12309 - protein, 17 aa, Artificial Sequence
  Synthetically generated peptide
  VARIANT (1)..(17): Xaa = Any Amino Acid
ACEFXCANPXACXXTGC

SEQ ID NO: 12310 - protein, 17 aa, Artificial Sequence
  Synthetically generated peptide
  VARIANT (1)..(17): Xaa = Any Amino Acid
ACEFXCANPXACXTXGC

SEQ ID NO: 12311 - protein, 17 aa, Artificial Sequence
  Synthetically generated peptide
  VARIANT (1)..(17): Xaa = Any Amino Acid
ACEFXCANPXACXTGXC

SEQ ID NO: 12312 - protein, 16 aa, Artificial Sequence
  Synthetically generated peptide
  VARIANT (1)..(16): Xaa = Any Amino Acid
ACEFXCANPXACTXGC

SEQ ID NO: 12313 - protein, 17 aa, Artificial Sequence
  Synthetically generated peptide
  VARIANT (1)..(17): Xaa = Any Amino Acid
ACEFXCANPXACTXXGC

SEQ ID NO: 12314 - protein, 17 aa, Artificial Sequence
  Synthetically generated peptide
  VARIANT (1)..(17): Xaa = Any Amino Acid
ACEFXCANPXACTXGXC

SEQ ID NO: 12315 - protein, 16 aa, Artificial Sequence
  Synthetically generated peptide
  VARIANT (1)..(16): Xaa = Any Amino Acid
ACEFXCANPXACTGXC

SEQ ID NO: 12316 - protein, 17 aa, Artificial Sequence
  Synthetically generated peptide
  VARIANT (1)..(17): Xaa = Any Amino Acid
ACEFXCANPXACTGXXC

SEQ ID NO: 12317 - protein, 15 aa, Artificial Sequence
  Synthetically generated peptide
  VARIANT (1)..(15): Xaa = Any Amino Acid
ACEFXCANPAXCTGC

SEQ ID NO: 12318 - protein, 16 aa, Artificial Sequence
  Synthetically generated peptide
  VARIANT (1)..(16): Xaa = Any Amino Acid
ACEFXCANPAXXCTGC

SEQ ID NO: 12319 - protein, 17 aa, Artificial Sequence
  Synthetically generated peptide
  VARIANT (1)..(17): Xaa = Any Amino Acid
ACEFXCANPAXXXCTGC

SEQ ID NO: 12320 - protein, 17 aa, Artificial Sequence
  Synthetically generated peptide
  VARIANT (1)..(17): Xaa = Any Amino Acid
ACEFXCANPAXXCXTGC

SEQ ID NO: 12321 - protein, 17 aa, Artificial Sequence
  Synthetically generated peptide
  VARIANT (1)..(17): Xaa = Any Amino Acid
ACEFXCANPAXXCTXGC

SEQ ID NO: 12322 - protein, 17 aa, Artificial Sequence
  Synthetically generated peptide
  VARIANT (1)..(17): Xaa = Any Amino Acid
ACEFXCANPAXXCTGXC

SEQ ID NO: 12323 - protein, 16 aa, Artificial Sequence
  Synthetically generated peptide
  VARIANT (1)..(16): Xaa = Any Amino Acid
ACEFXCANPAXCXTGC

SEQ ID NO: 12324 - protein, 17 aa, Artificial Sequence
  Synthetically generated peptide
  VARIANT (1)..(17): Xaa = Any Amino Acid
ACEFXCANPAXCXXTGC

SEQ ID NO: 12325 - protein, 17 aa, Artificial Sequence
  Synthetically generated peptide
  VARIANT (1)..(17): Xaa = Any Amino Acid
ACEFXCANPAXCXTXGC

SEQ ID NO: 12326 - protein, 17 aa, Artificial Sequence
  Synthetically generated peptide
  VARIANT (1)..(17): Xaa = Any Amino Acid
ACEFXCANPAXCXTGXC

SEQ ID NO: 12327 - protein, 16 aa, Artificial Sequence
  Synthetically generated peptide
  VARIANT (1)..(16): Xaa = Any Amino Acid
ACEFXCANPAXCTXGC

SEQ ID NO: 12328 - protein, 17 aa, Artificial Sequence
  Synthetically generated peptide
  VARIANT (1)..(17): Xaa = Any Amino Acid
ACEFXCANPAXCTXXGC

SEQ ID NO: 12329 - protein, 17 aa, Artificial Sequence
  Synthetically generated peptide
  VARIANT (1)..(17): Xaa = Any Amino Acid
ACEFXCANPAXCTXGXC

SEQ ID NO: 12330 - protein, 16 aa, Artificial Sequence
  Synthetically generated peptide
  VARIANT (1)..(16): Xaa = Any Amino Acid
ACEFXCANPAXCTGXC

SEQ ID NO: 12331 - protein, 17 aa, Artificial Sequence
  Synthetically generated peptide
  VARIANT (1)..(17): Xaa = Any Amino Acid
ACEFXCANPAXCTGXXC

SEQ ID NO: 12332 - protein, 15 aa, Artificial Sequence
  Synthetically generated peptide
  VARIANT (1)..(15): Xaa = Any Amino Acid
ACEFXCANPACXTGC

SEQ ID NO: 12333 - protein, 16 aa, Artificial Sequence
  Synthetically generated peptide
  VARIANT (1)..(16): Xaa = Any Amino Acid
ACEFXCANPACXXTGC

SEQ ID NO: 12334 - protein, 17 aa, Artificial Sequence
  Synthetically generated peptide
  VARIANT (1)..(17): Xaa = Any Amino Acid
ACEFXCANPACXXXTGC

SEQ ID NO: 12335 - protein, 17 aa, Artificial Sequence
  Synthetically generated peptide
  VARIANT (1)..(17): Xaa = Any Amino Acid
ACEFXCANPACXXTXGC

SEQ ID NO: 12336 - protein, 17 aa, Artificial Sequence
  Synthetically generated peptide
  VARIANT (1)..(17): Xaa = Any Amino Acid
ACEFXCANPACXXTGXC

SEQ ID NO: 12337 - protein, 16 aa, Artificial Sequence
  Synthetically generated peptide
  VARIANT (1)..(16): Xaa = Any Amino Acid
ACEFXCANPACXTXGC

SEQ ID NO: 12338 - protein, 17 aa, Artificial Sequence
  Synthetically generated peptide
  VARIANT (1)..(17): Xaa = Any Amino Acid
ACEFXCANPACXTXXGC

SEQ ID NO: 12339 - protein, 17 aa, Artificial Sequence
  Synthetically generated peptide
  VARIANT (1)..(17): Xaa = Any Amino Acid
ACEFXCANPACXTXGXC

SEQ ID NO: 12340 - protein, 16 aa, Artificial Sequence
  Synthetically generated peptide
  VARIANT (1)..(16): Xaa = Any Amino Acid
ACEFXCANPACXTGXC

SEQ ID NO: 12341 - protein, 17 aa, Artificial Sequence
  Synthetically generated peptide
  VARIANT (1)..(17): Xaa = Any Amino Acid
ACEFXCANPACXTGXXC

SEQ ID NO: 12342 - protein, 15 aa, Artificial Sequence
  Synthetically generated peptide
  VARIANT (1)..(15): Xaa = Any Amino Acid
ACEFXCANPACTXGC

SEQ ID NO: 12343 - protein, 16 aa, Artificial Sequence
  Synthetically generated peptide
  VARIANT (1)..(16): Xaa = Any Amino Acid
ACEFXCANPACTXXGC

SEQ ID NO: 12344 - protein, 17 aa, Artificial Sequence
  Synthetically generated peptide
  VARIANT (1)..(17): Xaa = Any Amino Acid
ACEFXCANPACTXXXGC

SEQ ID NO: 12345 - protein, 17 aa, Artificial Sequence
  Synthetically generated peptide
  VARIANT (1)..(17): Xaa = Any Amino Acid
ACEFXCANPACTXXGXC

SEQ ID NO: 12346 - protein, 16 aa, Artificial Sequence
  Synthetically generated peptide
  VARIANT (1)..(16): Xaa = Any Amino Acid
ACEFXCANPACTXGXC

SEQ ID NO: 12347 - protein, 17 aa, Artificial Sequence
  Synthetically generated peptide
  VARIANT (1)..(17): Xaa = Any Amino Acid
ACEFXCANPACTXGXXC

SEQ ID NO: 12348 - protein, 15 aa, Artificial Sequence
  Synthetically generated peptide
  VARIANT (1)..(15): Xaa = Any Amino Acid
ACEFXCANPACTGXC

SEQ ID NO: 12349 - protein, 16 aa, Artificial Sequence
  Synthetically generated peptide
  VARIANT (1)..(16): Xaa = Any Amino Acid
ACEFXCANPACTGXXC

SEQ ID NO: 12350 - protein, 17 aa, Artificial Sequence
  Synthetically generated peptide
  VARIANT (1)..(17): Xaa = Any Amino Acid
ACEFXCANPACTGXXXC

SEQ ID NO: 12351 - protein, 14 aa, Artificial Sequence
  Synthetically generated peptide
  VARIANT (1)..(14): Xaa = Any Amino Acid
ACEFCAXNPACTGC

SEQ ID NO: 12352 - protein, 15 aa, Artificial Sequence
  Synthetically generated peptide
  VARIANT (1)..(15): Xaa = Any Amino Acid
ACEFCAXXNPACTGC

SEQ ID NO: 12353 - protein, 16 aa, Artificial Sequence
  Synthetically generated peptide
  VARIANT (1)..(16): Xaa = Any Amino Acid
ACEFCAXXXNPACTGC

SEQ ID NO: 12354 - protein, 17 aa, Artificial Sequence
  Synthetically generated peptide
  VARIANT (1)..(17): Xaa = Any Amino Acid
ACEFCAXXXXNPACTGC

SEQ ID NO: 12355 - protein, 17 aa, Artificial Sequence
  Synthetically generated peptide
  VARIANT (1)..(17): Xaa = Any Amino Acid
ACEFCAXXXNXPACTGC

SEQ ID NO: 12356 - protein, 17 aa, Artificial Sequence
  Synthetically generated peptide
  VARIANT (1)..(17): Xaa = Any Amino Acid
ACEFCAXXXNPXACTGC

SEQ ID NO: 12357 - protein, 17 aa, Artificial Sequence
  Synthetically generated peptide
  VARIANT (1)..(17): Xaa = Any Amino Acid
ACEFCAXXXNPAXCTGC

SEQ ID NO: 12358 - protein, 17 aa, Artificial Sequence
  Synthetically generated peptide
  VARIANT (1)..(17): Xaa = Any Amino Acid
ACEFCAXXXNPACXTGC

SEQ ID NO: 12359 - protein, 17 aa, Artificial Sequence
  Synthetically generated peptide
  VARIANT (1)..(17): Xaa = Any Amino Acid
ACEFCAXXXNPACTXGC

SEQ ID NO: 12360 - protein, 17 aa, Artificial Sequence
  Synthetically generated peptide
  VARIANT (1)..(17): Xaa = Any Amino Acid
ACEFCAXXXNPACTGXC

SEQ ID NO: 12361 - protein, 16 aa, Artificial Sequence
  Synthetically generated peptide
  VARIANT (1)..(16): Xaa = Any Amino Acid
ACEFCAXXNXPACTGC

SEQ ID NO: 12362 - protein, 17 aa, Artificial Sequence
  Synthetically generated peptide
  VARIANT (1)..(17): Xaa = Any Amino Acid
ACEFCAXXNXXPACTGC

SEQ ID NO: 12363 - protein, 17 aa, Artificial Sequence
  Synthetically generated peptide
  VARIANT (1)..(17): Xaa = Any Amino Acid
ACEFCAXXNXPXACTGC

SEQ ID NO: 12364 - protein, 17 aa, Artificial Sequence
  Synthetically generated peptide
  VARIANT (1)..(17): Xaa = Any Amino Acid
ACEFCAXXNXPAXCTGC

SEQ ID NO: 12365 - protein, 17 aa, Artificial Sequence
  Synthetically generated peptide
  VARIANT (1)..(17): Xaa = Any Amino Acid
ACEFCAXXNXPACXTGC

SEQ ID NO: 12366 - protein, 17 aa, Artificial Sequence
  Synthetically generated peptide
  VARIANT (1)..(17): Xaa = Any Amino Acid
ACEFCAXXNXPACTXGC

SEQ ID NO: 12367 - protein, 17 aa, Artificial Sequence
  Synthetically generated peptide
  VARIANT (1)..(17): Xaa = Any Amino Acid
ACEFCAXXNXPACTGXC

SEQ ID NO: 12368 - protein, 16 aa, Artificial Sequence
  Synthetically generated peptide
  VARIANT (1)..(16): Xaa = Any Amino Acid
ACEFCAXXNPXACTGC

SEQ ID NO: 12369 - protein, 17 aa, Artificial Sequence
  Synthetically generated peptide
  VARIANT (1)..(17): Xaa = Any Amino Acid
ACEFCAXXNPXXACTGC

SEQ ID NO: 12370 - protein, 17 aa, Artificial Sequence
  Synthetically generated peptide
  VARIANT (1)..(17): Xaa = Any Amino Acid
ACEFCAXXNPXAXCTGC

SEQ ID NO: 12371 - protein, 17 aa, Artificial Sequence
  Synthetically generated peptide
  VARIANT (1)..(17): Xaa = Any Amino Acid
ACEFCAXXNPXACXTGC

SEQ ID NO: 12372 - protein, 17 aa, Artificial Sequence
  Synthetically generated peptide
  VARIANT (1)..(17): Xaa = Any Amino Acid
ACEFCAXXNPXACTXGC

SEQ ID NO: 12373 - protein, 17 aa, Artificial Sequence
  Synthetically generated peptide
  VARIANT (1)..(17): Xaa = Any Amino Acid
ACEFCAXXNPXACTGXC

SEQ ID NO: 12374 - protein, 16 aa, Artificial Sequence
  Synthetically generated peptide
  VARIANT (1)..(16): Xaa = Any Amino Acid
ACEFCAXXNPAXCTGC

SEQ ID NO: 12375 - protein, 17 aa, Artificial Sequence
  Synthetically generated peptide
  VARIANT (1)..(17): Xaa = Any Amino Acid
ACEFCAXXNPAXXCTGC

SEQ ID NO: 12376 - protein, 17 aa, Artificial Sequence
  Synthetically generated peptide
  VARIANT (1)..(17): Xaa = Any Amino Acid
ACEFCAXXNPAXCXTGC

SEQ ID NO: 12377 - protein, 17 aa, Artificial Sequence
  Synthetically generated peptide
  VARIANT (1)..(17): Xaa = Any Amino Acid
ACEFCAXXNPAXCTXGC

SEQ ID NO: 12378 - protein, 17 aa, Artificial Sequence
  Synthetically generated peptide
  VARIANT (1)..(17): Xaa = Any Amino Acid
ACEFCAXXNPAXCTGXC

SEQ ID NO: 12379 - protein, 16 aa, Artificial Sequence
  Synthetically generated peptide
  VARIANT (1)..(16): Xaa = Any Amino Acid
ACEFCAXXNPACXTGC

SEQ ID NO: 12380 - protein, 17 aa, Artificial Sequence
  Synthetically generated peptide
  VARIANT (1)..(17): Xaa = Any Amino Acid
ACEFCAXXNPACXXTGC

SEQ ID NO: 12381 - protein, 17 aa, Artificial Sequence
  Synthetically generated peptide
  VARIANT (1)..(17): Xaa = Any Amino Acid
ACEFCAXXNPACXTXGC

SEQ ID NO: 12382 - protein, 17 aa, Artificial Sequence
  Synthetically generated peptide
  VARIANT (1)..(17): Xaa = Any Amino Acid
ACEFCAXXNPACXTGXC

SEQ ID NO: 12383 - protein, 16 aa, Artificial Sequence
  Synthetically generated peptide
  VARIANT (1)..(16): Xaa = Any Amino Acid
ACEFCAXXNPACTXGC

SEQ ID NO: 12384 - protein, 17 aa, Artificial Sequence
  Synthetically generated peptide
  VARIANT (1)..(17): Xaa = Any Amino Acid
ACEFCAXXNPACTXXGC

SEQ ID NO: 12385 - protein, 17 aa, Artificial Sequence
  Synthetically generated peptide
  VARIANT (1)..(17): Xaa = Any Amino Acid
ACEFCAXXNPACTXGXC

SEQ ID NO: 12386 - protein, 16 aa, Artificial Sequence
  Synthetically generated peptide
  VARIANT (1)..(16): Xaa = Any Amino Acid
ACEFCAXXNPACTGXC

SEQ ID NO: 12387 - protein, 17 aa, Artificial Sequence
  Synthetically generated peptide
  VARIANT (1)..(17): Xaa = Any Amino Acid
ACEFCAXXNPACTGXXC

SEQ ID NO: 12388 - protein, 15 aa, Artificial Sequence
  Synthetically generated peptide
  VARIANT (1)..(15): Xaa = Any Amino Acid
ACEFCAXNXPACTGC

SEQ ID NO: 12389 - protein, 16 aa, Artificial Sequence
  Synthetically generated peptide
  VARIANT (1)..(16): Xaa = Any Amino Acid
ACEFCAXNXXPACTGC

SEQ ID NO: 12390 - protein, 17 aa, Artificial Sequence
  Synthetically generated peptide
  VARIANT (1)..(17): Xaa = Any Amino Acid
ACEFCAXNXXXPACTGC

SEQ ID NO: 12391 - protein, 17 aa, Artificial Sequence
  Synthetically generated peptide
  VARIANT (1)..(17): Xaa = Any Amino Acid
ACEFCAXNXXPXACTGC

SEQ ID NO: 12392 - protein, 17 aa, Artificial Sequence
  Synthetically generated peptide
  VARIANT (1)..(17): Xaa = Any Amino Acid
ACEFCAXNXXPAXCTGC

SEQ ID NO: 12393 - protein, 17 aa, Artificial Sequence
  Synthetically generated peptide
  VARIANT (1)..(17): Xaa = Any Amino Acid
ACEFCAXNXXPACXTGC

SEQ ID NO: 12394 - protein, 17 aa, Artificial Sequence
  Synthetically generated peptide
  VARIANT (1)..(17): Xaa = Any Amino Acid
ACEFCAXNXXPACTXGC

SEQ ID NO: 12395 - protein, 17 aa, Artificial Sequence
  Synthetically generated peptide
  VARIANT (1)..(17): Xaa = Any Amino Acid
ACEFCAXNXXPACTGXC

SEQ ID NO: 12396 - protein, 16 aa, Artificial Sequence
  Synthetically generated peptide
  VARIANT (1)..(16): Xaa = Any Amino Acid
ACEFCAXNXPXACTGC

SEQ ID NO: 12397 - protein, 17 aa, Artificial Sequence
  Synthetically generated peptide
  VARIANT (1)..(17): Xaa = Any Amino Acid
ACEFCAXNXPXXACTGC

SEQ ID NO: 12398 - protein, 17 aa, Artificial Sequence
  Synthetically generated peptide
  VARIANT (1)..(17): Xaa = Any Amino Acid
ACEFCAXNXPXAXCTGC

SEQ ID NO: 12399 - protein, 17 aa, Artificial Sequence
  Synthetically generated peptide
  VARIANT (1)..(17): Xaa = Any Amino Acid
ACEFCAXNXPXACXTGC

SEQ ID NO: 12400 - protein, 17 aa, Artificial Sequence
  Synthetically generated peptide
  VARIANT (1)..(17): Xaa = Any Amino Acid
ACEFCAXNXPXACTXGC

SEQ ID NO: 12401 - protein, 17 aa, Artificial Sequence
  Synthetically generated peptide
  VARIANT (1)..(17): Xaa = Any Amino Acid
ACEFCAXNXPXACTGXC

SEQ ID NO: 12402 - protein, 16 aa, Artificial Sequence
  Synthetically generated peptide
  VARIANT (1)..(16): Xaa = Any Amino Acid
ACEFCAXNXPAXCTGC

SEQ ID NO: 12403 - protein, 17 aa, Artificial Sequence
  Synthetically generated peptide
  VARIANT (1)..(17): Xaa = Any Amino Acid
ACEFCAXNXPAXXCTGC

SEQ ID NO: 12404 - protein, 17 aa, Artificial Sequence
  Synthetically generated peptide
  VARIANT (1)..(17): Xaa = Any Amino Acid
ACEFCAXNXPAXCXTGC

SEQ ID NO: 12405 - protein, 17 aa, Artificial Sequence
  Synthetically generated peptide
  VARIANT (1)..(17): Xaa = Any Amino Acid
ACEFCAXNXPAXCTXGC

SEQ ID NO: 12406 - protein, 17 aa, Artificial Sequence
  Synthetically generated peptide
  VARIANT (1)..(17): Xaa = Any Amino Acid
ACEFCAXNXPAXCTGXC

SEQ ID NO: 12407 - protein, 16 aa, Artificial Sequence
  Synthetically generated peptide
  VARIANT (1)..(16): Xaa = Any Amino Acid
ACEFCAXNXPACXTGC

SEQ ID NO: 12408 - protein, 17 aa, Artificial Sequence
  Synthetically generated peptide
  VARIANT (1)..(17): Xaa = Any Amino Acid
ACEFCAXNXPACXXTGC

SEQ ID NO: 12409 - protein, 17 aa, Artificial Sequence
  Synthetically generated peptide
  VARIANT (1)..(17): Xaa = Any Amino Acid
ACEFCAXNXPACXTXGC

SEQ ID NO: 12410 - protein, 17 aa, Artificial Sequence
  Synthetically generated peptide
  VARIANT (1)..(17): Xaa = Any Amino Acid
ACEFCAXNXPACXTGXC

SEQ ID NO: 12411 - protein, 16 aa, Artificial Sequence
  Synthetically generated peptide
  VARIANT (1)..(16): Xaa = Any Amino Acid
ACEFCAXNXPACTXGC

SEQ ID NO: 12412 - protein, 17 aa, Artificial Sequence
  Synthetically generated peptide
  VARIANT (1)..(17): Xaa = Any Amino Acid
ACEFCAXNXPACTXXGC

SEQ ID NO: 12413 - protein, 17 aa, Artificial Sequence
  Synthetically generated peptide
  VARIANT (1)..(17): Xaa = Any Amino Acid
ACEFCAXNXPACTXGXC

SEQ ID NO: 12414 - protein, 16 aa, Artificial Sequence
  Synthetically generated peptide
  VARIANT (1)..(16): Xaa = Any Amino Acid
ACEFCAXNXPACTGXC

SEQ ID NO: 12415 - protein, 17 aa, Artificial Sequence
  Synthetically generated peptide
  VARIANT (1)..(17): Xaa = Any Amino Acid
ACEFCAXNXPACTGXXC

SEQ ID NO: 12416 - protein, 15 aa, Artificial Sequence
  Synthetically generated peptide
  VARIANT (1)..(15): Xaa = Any Amino Acid
ACEFCAXNPXACTGC

SEQ ID NO: 12417 - protein, 16 aa, Artificial Sequence
  Synthetically generated peptide
  VARIANT (1)..(16): Xaa = Any Amino Acid
ACEFCAXNPXXACTGC

SEQ ID NO: 12418 - protein, 17 aa, Artificial Sequence
  Synthetically generated peptide
  VARIANT (1)..(17): Xaa = Any Amino Acid
ACEFCAXNPXXXACTGC

SEQ ID NO: 12419 - protein, 17 aa, Artificial Sequence
  Synthetically generated peptide
  VARIANT (1)..(17): Xaa = Any Amino Acid
ACEFCAXNPXXAXCTGC

SEQ ID NO: 12420 - protein, 17 aa, Artificial Sequence
  Synthetically generated peptide
  VARIANT (1)..(17): Xaa = Any Amino Acid
ACEFCAXNPXXACXTGC

SEQ ID NO: 12421 - protein, 17 aa, Artificial Sequence
  Synthetically generated peptide
  VARIANT (1)..(17): Xaa = Any Amino Acid
ACEFCAXNPXXACTXGC

SEQ ID NO: 12422 - protein, 17 aa, Artificial Sequence
  Synthetically generated peptide
  VARIANT (1)..(17): Xaa = Any Amino Acid
ACEFCAXNPXXACTGXC

SEQ ID NO: 12423 - protein, 16 aa, Artificial Sequence
  Synthetically generated peptide
  VARIANT (1)..(16): Xaa = Any Amino Acid
ACEFCAXNPXAXCTGC

SEQ ID NO: 12424 - protein, 17 aa, Artificial Sequence
  Synthetically generated peptide
  VARIANT (1)..(17): Xaa = Any Amino Acid
ACEFCAXNPXAXXCTGC

SEQ ID NO: 12425 - protein, 17 aa, Artificial Sequence
  Synthetically generated peptide
  VARIANT (1)..(17): Xaa = Any Amino Acid
ACEFCAXNPXAXCXTGC

SEQ ID NO: 12426 - protein, 17 aa, Artificial Sequence
  Synthetically generated peptide
  VARIANT (1)..(17): Xaa = Any Amino Acid
ACEFCAXNPXAXCTXGC

SEQ ID NO: 12427 - protein, 17 aa, Artificial Sequence
  Synthetically generated peptide
  VARIANT (1)..(17): Xaa = Any Amino Acid
ACEFCAXNPXAXCTGXC

SEQ ID NO: 12428 - protein, 16 aa, Artificial Sequence
  Synthetically generated peptide
  VARIANT (1)..(16): Xaa = Any Amino Acid
ACEFCAXNPXACXTGC

SEQ ID NO: 12429 - protein, 17 aa, Artificial Sequence
  Synthetically generated peptide
  VARIANT (1)..(17): Xaa = Any Amino Acid
ACEFCAXNPXACXXTGC

SEQ ID NO: 12430 - protein, 17 aa, Artificial Sequence
  Synthetically generated peptide
  VARIANT (1)..(17): Xaa = Any Amino Acid
ACEFCAXNPXACXTXGC

SEQ ID NO: 12431 - protein, 17 aa, Artificial Sequence
  Synthetically generated peptide
  VARIANT (1)..(17): Xaa = Any Amino Acid
ACEFCAXNPXACXTGXC

SEQ ID NO: 12432 - protein, 16 aa, Artificial Sequence
  Synthetically generated peptide
  VARIANT (1)..(16): Xaa = Any Amino Acid
ACEFCAXNPXACTXGC

SEQ ID NO: 12433 - protein, 17 aa, Artificial Sequence
  Synthetically generated peptide
  VARIANT (1)..(17): Xaa = Any Amino Acid
ACEFCAXNPXACTXXGC

SEQ ID NO: 12434 - protein, 17 aa, Artificial Sequence
  Synthetically generated peptide
  VARIANT (1)..(17): Xaa = Any Amino Acid
ACEFCAXNPXACTXGXC

SEQ ID NO: 12435 - protein, 16 aa, Artificial Sequence
  Synthetically generated peptide
  VARIANT (1)..(16): Xaa = Any Amino Acid
ACEFCAXNPXACTGXC

SEQ ID NO: 12436 - protein, 17 aa, Artificial Sequence
  Synthetically generated peptide
  VARIANT (1)..(17): Xaa = Any Amino Acid
ACEFCAXNPXACTGXXC

SEQ ID NO: 12437 - protein, 15 aa, Artificial Sequence
  Synthetically generated peptide
  VARIANT (1)..(15): Xaa = Any Amino Acid
ACEFCAXNPAXCTGC

SEQ ID NO: 12438 - protein, 16 aa, Artificial Sequence
  Synthetically generated peptide
  VARIANT (1)..(16): Xaa = Any Amino Acid
ACEFCAXNPAXXCTGC

SEQ ID NO: 12439 - protein, 17 aa, Artificial Sequence
  Synthetically generated peptide
  VARIANT (1)..(17): Xaa = Any Amino Acid
ACEFCAXNPAXXXCTGC

SEQ ID NO: 12440 - protein, 17 aa, Artificial Sequence
  Synthetically generated peptide
  VARIANT (1)..(17): Xaa = Any Amino Acid
ACEFCAXNPAXXCXTGC

SEQ ID NO: 12441 - protein, 17 aa, Artificial Sequence
  Synthetically generated peptide
  VARIANT (1)..(17): Xaa = Any Amino Acid
ACEFCAXNPAXXCTXGC

SEQ ID NO: 12442 - protein, 17 aa, Artificial Sequence
  Synthetically generated peptide
  VARIANT (1)..(17): Xaa = Any Amino Acid
ACEFCAXNPAXXCTGXC

SEQ ID NO: 12443 - protein, 16 aa, Artificial Sequence
  Synthetically generated peptide
  VARIANT (1)..(16): Xaa = Any Amino Acid
ACEFCAXNPAXCXTGC

SEQ ID NO: 12444 - protein, 17 aa, Artificial Sequence
  Synthetically generated peptide
  VARIANT (1)..(17): Xaa = Any Amino Acid
ACEFCAXNPAXCXXTGC

SEQ ID NO: 12445 - protein, 17 aa, Artificial Sequence
  Synthetically generated peptide
  VARIANT (1)..(17): Xaa = Any Amino Acid
ACEFCAXNPAXCXTXGC

SEQ ID NO: 12446 - protein, 17 aa, Artificial Sequence
  Synthetically generated peptide
  VARIANT (1)..(17): Xaa = Any Amino Acid
ACEFCAXNPAXCXTGXC

SEQ ID NO: 12447 - protein, 16 aa, Artificial Sequence
  Synthetically generated peptide
  VARIANT (1)..(16): Xaa = Any Amino Acid
ACEFCAXNPAXCTXGC

SEQ ID NO: 12448 - protein, 17 aa, Artificial Sequence
  Synthetically generated peptide
  VARIANT (1)..(17): Xaa = Any Amino Acid
ACEFCAXNPAXCTXXGC

SEQ ID NO: 12449 - protein, 17 aa, Artificial Sequence
  Synthetically generated peptide
  VARIANT (1)..(17): Xaa = Any Amino Acid
ACEFCAXNPAXCTXGXC

SEQ ID NO: 12450 - protein, 16 aa, Artificial Sequence
  Synthetically generated peptide
  VARIANT (1)..(16): Xaa = Any Amino Acid
ACEFCAXNPAXCTGXC

SEQ ID NO: 12451 - protein, 17 aa, Artificial Sequence
  Synthetically generated peptide
  VARIANT (1)..(17): Xaa = Any Amino Acid
ACEFCAXNPAXCTGXXC

SEQ ID NO: 12452 - protein, 15 aa, Artificial Sequence
  Synthetically generated peptide
  VARIANT (1)..(15): Xaa = Any Amino Acid
ACEFCAXNPACXTGC

SEQ ID NO: 12453 - protein, 16 aa, Artificial Sequence
  Synthetically generated peptide
  VARIANT (1)..(16): Xaa = Any Amino Acid
ACEFCAXNPACXXTGC

SEQ ID NO: 12454 - protein, 17 aa, Artificial Sequence
  Synthetically generated peptide
  VARIANT (1)..(17): Xaa = Any Amino Acid
ACEFCAXNPACXXXTGC

SEQ ID NO: 12455 - protein, 17 aa, Artificial Sequence
  Synthetically generated peptide
  VARIANT (1)..(17): Xaa = Any Amino Acid
ACEFCAXNPACXXTXGC

SEQ ID NO: 12456 - protein, 17 aa, Artificial Sequence
  Synthetically generated peptide
  VARIANT (1)..(17): Xaa = Any Amino Acid
ACEFCAXNPACXXTGXC

SEQ ID NO: 12457 - protein, 16 aa, Artificial Sequence
  Synthetically generated peptide
  VARIANT (1)..(16): Xaa = Any Amino Acid
ACEFCAXNPACXTXGC

SEQ ID NO: 12458 - protein, 17 aa, Artificial Sequence
  Synthetically generated peptide
  VARIANT (1)..(17): Xaa = Any Amino Acid
ACEFCAXNPACXTXXGC

SEQ ID NO: 12459 - protein, 17 aa, Artificial Sequence
  Synthetically generated peptide
  VARIANT (1)..(17): Xaa = Any Amino Acid
ACEFCAXNPACXTXGXC

SEQ ID NO: 12460 - protein, 16 aa, Artificial Sequence
  Synthetically generated peptide
  VARIANT (1)..(16): Xaa = Any Amino Acid
ACEFCAXNPACXTGXC

SEQ ID NO: 12461 - protein, 17 aa, Artificial Sequence
  Synthetically generated peptide
  VARIANT (1)..(17): Xaa = Any Amino Acid
ACEFCAXNPACXTGXXC

SEQ ID NO: 12462 - protein, 15 aa, Artificial Sequence
  Synthetically generated peptide
  VARIANT (1)..(15): Xaa = Any Amino Acid
ACEFCAXNPACTXGC

SEQ ID NO: 12463 - protein, 16 aa, Artificial Sequence
  Synthetically generated peptide
  VARIANT (1)..(16): Xaa = Any Amino Acid
ACEFCAXNPACTXXGC

SEQ ID NO: 12464 - protein, 17 aa, Artificial Sequence
  Synthetically generated peptide
  VARIANT (1)..(17): Xaa = Any Amino Acid
ACEFCAXNPACTXXXGC

SEQ ID NO: 12465 - protein, 17 aa, Artificial Sequence
  Synthetically generated peptide
  VARIANT (1)..(17): Xaa = Any Amino Acid
ACEFCAXNPACTXXGXC

SEQ ID NO: 12466 - protein, 16 aa, Artificial Sequence
  Synthetically generated peptide
  VARIANT (1)..(16): Xaa = Any Amino Acid
ACEFCAXNPACTXGXC

SEQ ID NO: 12467 - protein, 17 aa, Artificial Sequence
  Synthetically generated peptide
  VARIANT (1)..(17): Xaa = Any Amino Acid
ACEFCAXNPACTXGXXC

SEQ ID NO: 12468 - protein, 15 aa, Artificial Sequence
  Synthetically generated peptide
  VARIANT (1)..(15): Xaa = Any Amino Acid
ACEFCAXNPACTGXC

SEQ ID NO: 12469 - protein, 16 aa, Artificial Sequence
  Synthetically generated peptide
  VARIANT (1)..(16): Xaa = Any Amino Acid
ACEFCAXNPACTGXXC

SEQ ID NO: 12470 - protein, 17 aa, Artificial Sequence
  Synthetically generated peptide
  VARIANT (1)..(17): Xaa = Any Amino Acid
ACEFCAXNPACTGXXXC

SEQ ID NO: 12471 - protein, 14 aa, Artificial Sequence
  Synthetically generated peptide
  VARIANT (1)..(14): Xaa = Any Amino Acid
ACEFCANXPACTGC

SEQ ID NO: 12472 - protein, 15 aa, Artificial Sequence
  Synthetically generated peptide
  VARIANT (1)..(15): Xaa = Any Amino Acid
ACEFCANXXPACTGC

SEQ ID NO: 12473 - protein, 16 aa, Artificial Sequence
  Synthetically generated peptide
  VARIANT (1)..(16): Xaa = Any Amino Acid
ACEFCANXXXPACTGC

SEQ ID NO: 12474 - protein, 17 aa, Artificial Sequence
  Synthetically generated peptide
  VARIANT (1)..(17): Xaa = Any Amino Acid
ACEFCANXXXXPACTGC

SEQ ID NO: 12475 - protein, 17 aa, Artificial Sequence
  Synthetically generated peptide
  VARIANT (1)..(17): Xaa = Any Amino Acid
ACEFCANXXXPXACTGC

SEQ ID NO: 12476 - protein, 17 aa, Artificial Sequence
  Synthetically generated peptide
  VARIANT (1)..(17): Xaa = Any Amino Acid
ACEFCANXXXPAXCTGC

SEQ ID NO: 12477 - protein, 17 aa, Artificial Sequence
  Synthetically generated peptide
  VARIANT (1)..(17): Xaa = Any Amino Acid
ACEFCANXXXPACXTGC

SEQ ID NO: 12478 - protein, 17 aa, Artificial Sequence
  Synthetically generated peptide
  VARIANT (1)..(17): Xaa = Any Amino Acid
ACEFCANXXXPACTXGC

SEQ ID NO: 12479 - protein, 17 aa, Artificial Sequence
  Synthetically generated peptide
  VARIANT (1)..(17): Xaa = Any Amino Acid
ACEFCANXXXPACTGXC

SEQ ID NO: 12480 - protein, 16 aa, Artificial Sequence
  Synthetically generated peptide
  VARIANT (1)..(16): Xaa = Any Amino Acid
ACEFCANXXPXACTGC

SEQ ID NO: 12481 - protein, 17 aa, Artificial Sequence
  Synthetically generated peptide
  VARIANT (1)..(17): Xaa = Any Amino Acid
ACEFCANXXPXXACTGC

SEQ ID NO: 12482 - protein, 17 aa, Artificial Sequence
  Synthetically generated peptide
  VARIANT (1)..(17): Xaa = Any Amino Acid
ACEFCANXXPXAXCTGC

SEQ ID NO: 12483 - protein, 17 aa, Artificial Sequence
  Synthetically generated peptide
  VARIANT (1)..(17): Xaa = Any Amino Acid
ACEFCANXXPXACXTGC

SEQ ID NO: 12484 - protein, 17 aa, Artificial Sequence
  Synthetically generated peptide
  VARIANT (1)..(17): Xaa = Any Amino Acid
ACEFCANXXPXACTXGC

SEQ ID NO: 12485 - protein, 17 aa, Artificial Sequence
  Synthetically generated peptide
  VARIANT (1)..(17): Xaa = Any Amino Acid
ACEFCANXXPXACTGXC

SEQ ID NO: 12486 - protein, 16 aa, Artificial Sequence
  Synthetically generated peptide
  VARIANT (1)..(16): Xaa = Any Amino Acid
ACEFCANXXPAXCTGC

SEQ ID NO: 12487 - protein, 17 aa, Artificial Sequence
  Synthetically generated peptide
  VARIANT (1)..(17): Xaa = Any Amino Acid
ACEFCANXXPAXXCTGC

SEQ ID NO: 12488 - protein, 17 aa, Artificial Sequence
  Synthetically generated peptide
  VARIANT (1)..(17): Xaa = Any Amino Acid
ACEFCANXXPAXCXTGC

SEQ ID NO: 12489 - protein, 17 aa, Artificial Sequence
  Synthetically generated peptide
  VARIANT (1)..(17): Xaa = Any Amino Acid
ACEFCANXXPAXCTXGC

SEQ ID NO: 12490 - protein, 17 aa, Artificial Sequence
  Synthetically generated peptide
  VARIANT (1)..(17): Xaa = Any Amino Acid
ACEFCANXXPAXCTGXC

SEQ ID NO: 12491 - protein, 16 aa, Artificial Sequence
  Synthetically generated peptide
  VARIANT (1)..(16): Xaa = Any Amino Acid
ACEFCANXXPACXTGC

SEQ ID NO: 12492 - protein, 17 aa, Artificial Sequence
  Synthetically generated peptide
  VARIANT (1)..(17): Xaa = Any Amino Acid
ACEFCANXXPACXXTGC

SEQ ID NO: 12493 - protein, 17 aa, Artificial Sequence
  Synthetically generated peptide
  VARIANT (1)..(17): Xaa = Any Amino Acid
ACEFCANXXPACXTXGC

SEQ ID NO: 12494 - protein, 17 aa, Artificial Sequence
  Synthetically generated peptide
  VARIANT (1)..(17): Xaa = Any Amino Acid
ACEFCANXXPACXTGXC

SEQ ID NO: 12495 - protein, 16 aa, Artificial Sequence
  Synthetically generated peptide
  VARIANT (1)..(16): Xaa = Any Amino Acid
ACEFCANXXPACTXGC

SEQ ID NO: 12496 - protein, 17 aa, Artificial Sequence
  Synthetically generated peptide
  VARIANT (1)..(17): Xaa = Any Amino Acid
ACEFCANXXPACTXXGC

SEQ ID NO: 12497 - protein, 17 aa, Artificial Sequence
  Synthetically generated peptide
  VARIANT (1)..(17): Xaa = Any Amino Acid
ACEFCANXXPACTXGXC

SEQ ID NO: 12498 - protein, 16 aa, Artificial Sequence
  Synthetically generated peptide
  VARIANT (1)..(16): Xaa = Any Amino Acid
ACEFCANXXPACTGXC

SEQ ID NO: 12499 - protein, 17 aa, Artificial Sequence
  Synthetically generated peptide
  VARIANT (1)..(17): Xaa = Any Amino Acid
ACEFCANXXPACTGXXC

SEQ ID NO: 12500 - protein, 15 aa, Artificial Sequence
  Synthetically generated peptide
  VARIANT (1)..(15): Xaa = Any Amino Acid
ACEFCANXPXACTGC

SEQ ID NO: 12501 - protein, 16 aa, Artificial Sequence
  Synthetically generated peptide
  VARIANT (1)..(16): Xaa = Any Amino Acid
ACEFCANXPXXACTGC

SEQ ID NO: 12502 - protein, 17 aa, Artificial Sequence
  Synthetically generated peptide
  VARIANT (1)..(17): Xaa = Any Amino Acid
ACEFCANXPXXXACTGC

SEQ ID NO: 12503 - protein, 17 aa, Artificial Sequence
  Synthetically generated peptide
  VARIANT (1)..(17): Xaa = Any Amino Acid
ACEFCANXPXXAXCTGC

SEQ ID NO: 12504 - protein, 17 aa, Artificial Sequence
  Synthetically generated peptide
  VARIANT (1)..(17): Xaa = Any Amino Acid
ACEFCANXPXXACXTGC

SEQ ID NO: 12505 - protein, 17 aa, Artificial Sequence
  Synthetically generated peptide
  VARIANT (1)..(17): Xaa = Any Amino Acid
ACEFCANXPXXACTXGC

SEQ ID NO: 12506 - protein, 17 aa, Artificial Sequence
  Synthetically generated peptide
  VARIANT (1)..(17): Xaa = Any Amino Acid
ACEFCANXPXXACTGXC

SEQ ID NO: 12507 - protein, 16 aa, Artificial Sequence
  Synthetically generated peptide
  VARIANT (1)..(16): Xaa = Any Amino Acid
ACEFCANXPXAXCTGC

SEQ ID NO: 12508 - protein, 17 aa, Artificial Sequence
  Synthetically generated peptide
  VARIANT (1)..(17): Xaa = Any Amino Acid
ACEFCANXPXAXXCTGC

SEQ ID NO: 12509 - protein, 17 aa, Artificial Sequence
  Synthetically generated peptide
  VARIANT (1)..(17): Xaa = Any Amino Acid
ACEFCANXPXAXCXTGC

SEQ ID NO: 12510 - protein, 17 aa, Artificial Sequence
  Synthetically generated peptide
  VARIANT (1)..(17): Xaa = Any Amino Acid
ACEFCANXPXAXCTXGC

SEQ ID NO: 12511 - protein, 17 aa, Artificial Sequence
  Synthetically generated peptide
  VARIANT (1)..(17): Xaa = Any Amino Acid
ACEFCANXPXAXCTGXC

SEQ ID NO: 12512 - protein, 16 aa, Artificial Sequence
  Synthetically generated peptide
  VARIANT (1)..(16): Xaa = Any Amino Acid
ACEFCANXPXACXTGC

SEQ ID NO: 12513 - protein, 17 aa, Artificial Sequence
  Synthetically generated peptide
  VARIANT (1)..(17): Xaa = Any Amino Acid
ACEFCANXPXACXXTGC

SEQ ID NO: 12514 - protein, 17 aa, Artificial Sequence
  Synthetically generated peptide
  VARIANT (1)..(17): Xaa = Any Amino Acid
ACEFCANXPXACXTXGC

SEQ ID NO: 12515 - protein, 17 aa, Artificial Sequence
  Synthetically generated peptide
  VARIANT (1)..(17): Xaa = Any Amino Acid
ACEFCANXPXACXTGXC

SEQ ID NO: 12516 - protein, 16 aa, Artificial Sequence
  Synthetically generated peptide
  VARIANT (1)..(16): Xaa = Any Amino Acid
ACEFCANXPXACTXGC

SEQ ID NO: 12517 - protein, 17 aa, Artificial Sequence
  Synthetically generated peptide
  VARIANT (1)..(17): Xaa = Any Amino Acid
ACEFCANXPXACTXXGC

SEQ ID NO: 12518 - protein, 17 aa, Artificial Sequence
  Synthetically generated peptide
  VARIANT (1)..(17): Xaa = Any Amino Acid
ACEFCANXPXACTXGXC

SEQ ID NO: 12519 - protein, 16 aa, Artificial Sequence
  Synthetically generated peptide
  VARIANT (1)..(16): Xaa = Any Amino Acid
ACEFCANXPXACTGXC

SEQ ID NO: 12520 - protein, 17 aa, Artificial Sequence
  Synthetically generated peptide
  VARIANT (1)..(17): Xaa = Any Amino Acid
ACEFCANXPXACTGXXC

SEQ ID NO: 12521 - protein, 15 aa, Artificial Sequence
  Synthetically generated peptide
  VARIANT (1)..(15): Xaa = Any Amino Acid
ACEFCANXPAXCTGC

SEQ ID NO: 12522 - protein, 16 aa, Artificial Sequence
  Synthetically generated peptide
  VARIANT (1)..(16): Xaa = Any Amino Acid
ACEFCANXPAXXCTGC

SEQ ID NO: 12523 - protein, 17 aa, Artificial Sequence
  Synthetically generated peptide
  VARIANT (1)..(17): Xaa = Any Amino Acid
ACEFCANXPAXXXCTGC

SEQ ID NO: 12524 - protein, 17 aa, Artificial Sequence
  Synthetically generated peptide
  VARIANT (1)..(17): Xaa = Any Amino Acid
ACEFCANXPAXXCXTGC

SEQ ID NO: 12525 - protein, 17 aa, Artificial Sequence
  Synthetically generated peptide
  VARIANT (1)..(17): Xaa = Any Amino Acid
ACEFCANXPAXXCTXGC

SEQ ID NO: 12526 - protein, 17 aa, Artificial Sequence
  Synthetically generated peptide
  VARIANT (1)..(17): Xaa = Any Amino Acid
ACEFCANXPAXXCTGXC

SEQ ID NO: 12527 - protein, 16 aa, Artificial Sequence
  Synthetically generated peptide
  VARIANT (1)..(16): Xaa = Any Amino Acid
ACEFCANXPAXCXTGC

SEQ ID NO: 12528 - protein, 17 aa, Artificial Sequence
  Synthetically generated peptide
  VARIANT (1)..(17): Xaa = Any Amino Acid
ACEFCANXPAXCXXTGC

SEQ ID NO: 12529 - protein, 17 aa, Artificial Sequence
  Synthetically generated peptide
  VARIANT (1)..(17): Xaa = Any Amino Acid
ACEFCANXPAXCXTXGC

SEQ ID NO: 12530 - protein, 17 aa, Artificial Sequence
  Synthetically generated peptide
  VARIANT (1)..(17): Xaa = Any Amino Acid
ACEFCANXPAXCXTGXC

SEQ ID NO: 12531 - protein, 16 aa, Artificial Sequence
  Synthetically generated peptide
  VARIANT (1)..(16): Xaa = Any Amino Acid
ACEFCANXPAXCTXGC

SEQ ID NO: 12532 - protein, 17 aa, Artificial Sequence
  Synthetically generated peptide
  VARIANT (1)..(17): Xaa = Any Amino Acid
ACEFCANXPAXCTXXGC

SEQ ID NO: 12533 - protein, 17 aa, Artificial Sequence
  Synthetically generated peptide
  VARIANT (1)..(17): Xaa = Any Amino Acid
ACEFCANXPAXCTXGXC

SEQ ID NO: 12534 - protein, 16 aa, Artificial Sequence
  Synthetically generated peptide
  VARIANT (1)..(16): Xaa = Any Amino Acid
ACEFCANXPAXCTGXC

SEQ ID NO: 12535 - protein, 17 aa, Artificial Sequence
  Synthetically generated peptide
  VARIANT (1)..(17): Xaa = Any Amino Acid
ACEFCANXPAXCTGXXC

SEQ ID NO: 12536 - protein, 15 aa, Artificial Sequence
  Synthetically generated peptide
  VARIANT (1)..(15): Xaa = Any Amino Acid
ACEFCANXPACXTGC

SEQ ID NO: 12537 - protein, 16 aa, Artificial Sequence
  Synthetically generated peptide
  VARIANT (1)..(16): Xaa = Any Amino Acid
ACEFCANXPACXXTGC

SEQ ID NO: 12538 - protein, 17 aa, Artificial Sequence
  Synthetically generated peptide
  VARIANT (1)..(17): Xaa = Any Amino Acid
ACEFCANXPACXXXTGC

SEQ ID NO: 12539 - protein, 17 aa, Artificial Sequence
  Synthetically generated peptide
  VARIANT (1)..(17): Xaa = Any Amino Acid
ACEFCANXPACXXTXGC

SEQ ID NO: 12540 - protein, 17 aa, Artificial Sequence
  Synthetically generated peptide
  VARIANT (1)..(17): Xaa = Any Amino Acid
ACEFCANXPACXXTGXC

SEQ ID NO: 12541 - protein, 16 aa, Artificial Sequence
  Synthetically generated peptide
  VARIANT (1)..(16): Xaa = Any Amino Acid
ACEFCANXPACXTXGC

SEQ ID NO: 12542 - protein, 17 aa, Artificial Sequence
  Synthetically generated peptide
  VARIANT (1)..(17): Xaa = Any Amino Acid
ACEFCANXPACXTXXGC

SEQ ID NO: 12543 - protein, 17 aa, Artificial Sequence
  Synthetically generated peptide
  VARIANT (1)..(17): Xaa = Any Amino Acid
ACEFCANXPACXTXGXC

SEQ ID NO: 12544 - protein, 16 aa, Artificial Sequence
  Synthetically generated peptide
  VARIANT (1)..(16): Xaa = Any Amino Acid
ACEFCANXPACXTGXC

SEQ ID NO: 12545 - protein, 17 aa, Artificial Sequence
  Synthetically generated peptide
  VARIANT (1)..(17): Xaa = Any Amino Acid
ACEFCANXPACXTGXXC

SEQ ID NO: 12546 - protein, 15 aa, Artificial Sequence
  Synthetically generated peptide
  VARIANT (1)..(15): Xaa = Any Amino Acid
ACEFCANXPACTXGC

SEQ ID NO: 12547 - protein, 16 aa, Artificial Sequence
  Synthetically generated peptide
  VARIANT (1)..(16): Xaa = Any Amino Acid
ACEFCANXPACTXXGC

SEQ ID NO: 12548 - protein, 17 aa, Artificial Sequence
  Synthetically generated peptide
  VARIANT (1)..(17): Xaa = Any Amino Acid
ACEFCANXPACTXXXGC

SEQ ID NO: 12549 - protein, 17 aa, Artificial Sequence
  Synthetically generated peptide
  VARIANT (1)..(17): Xaa = Any Amino Acid
ACEFCANXPACTXXGXC

SEQ ID NO: 12550 - protein, 16 aa, Artificial Sequence
  Synthetically generated peptide
  VARIANT (1)..(16): Xaa = Any Amino Acid
ACEFCANXPACTXGXC

SEQ ID NO: 12551 - protein, 17 aa, Artificial Sequence
  Synthetically generated peptide
  VARIANT (1)..(17): Xaa = Any Amino Acid
ACEFCANXPACTXGXXC

SEQ ID NO: 12552 - protein, 15 aa, Artificial Sequence
  Synthetically generated peptide
  VARIANT (1)..(15): Xaa = Any Amino Acid
ACEFCANXPACTGXC

SEQ ID NO: 12553 - protein, 16 aa, Artificial Sequence
  Synthetically generated peptide
  VARIANT (1)..(16): Xaa = Any Amino Acid
ACEFCANXPACTGXXC

SEQ ID NO: 12554 - protein, 17 aa, Artificial Sequence
  Synthetically generated peptide
  VARIANT (1)..(17): Xaa = Any Amino Acid
ACEFCANXPACTGXXXC

SEQ ID NO: 12555 - protein, 14 aa, Artificial Sequence
  Synthetically generated peptide
  VARIANT (1)..(14): Xaa = Any Amino Acid
ACEFCANPXACTGC

SEQ ID NO: 12556 - protein, 15 aa, Artificial Sequence
  Synthetically generated peptide
  VARIANT (1)..(15): Xaa = Any Amino Acid
ACEFCANPXXACTGC

SEQ ID NO: 12557 - protein, 16 aa, Artificial Sequence
  Synthetically generated peptide
  VARIANT (1)..(16): Xaa = Any Amino Acid
ACEFCANPXXXACTGC

SEQ ID NO: 12558 - protein, 17 aa, Artificial Sequence
  Synthetically generated peptide
  VARIANT (1)..(17): Xaa = Any Amino Acid
ACEFCANPXXXXACTGC

SEQ ID NO: 12559 - protein, 17 aa, Artificial Sequence
  Synthetically generated peptide
  VARIANT (1)..(17): Xaa = Any Amino Acid
ACEFCANPXXXAXCTGC

SEQ ID NO: 12560 - protein, 17 aa, Artificial Sequence
  Synthetically generated peptide
  VARIANT (1)..(17): Xaa = Any Amino Acid
ACEFCANPXXXACXTGC

SEQ ID NO: 12561 - protein, 17 aa, Artificial Sequence
  Synthetically generated peptide
  VARIANT (1)..(17): Xaa = Any Amino Acid
ACEFCANPXXXACTXGC

SEQ ID NO: 12562 - protein, 17 aa, Artificial Sequence
  Synthetically generated peptide
  VARIANT (1)..(17): Xaa = Any Amino Acid
ACEFCANPXXXACTGXC

SEQ ID NO: 12563 - protein, 16 aa, Artificial Sequence
  Synthetically generated peptide
  VARIANT (1)..(16): Xaa = Any Amino Acid
ACEFCANPXXAXCTGC

SEQ ID NO: 12564 - protein, 17 aa, Artificial Sequence
  Synthetically generated peptide
  VARIANT (1)..(17): Xaa = Any Amino Acid
ACEFCANPXXAXXCTGC

SEQ ID NO: 12565 - protein, 17 aa, Artificial Sequence
  Synthetically generated peptide
  VARIANT (1)..(17): Xaa = Any Amino Acid
ACEFCANPXXAXCXTGC

SEQ ID NO: 12566 - protein, 17 aa, Artificial Sequence
  Synthetically generated peptide
  VARIANT (1)..(17): Xaa = Any Amino Acid
ACEFCANPXXAXCTXGC

SEQ ID NO: 12567 - protein, 17 aa, Artificial Sequence
  Synthetically generated peptide
  VARIANT (1)..(17): Xaa = Any Amino Acid
ACEFCANPXXAXCTGXC

SEQ ID NO: 12568 - protein, 16 aa, Artificial Sequence
  Synthetically generated peptide
  VARIANT (1)..(16): Xaa = Any Amino Acid
ACEFCANPXXACXTGC

SEQ ID NO: 12569 - protein, 17 aa, Artificial Sequence
  Synthetically generated peptide
  VARIANT (1)..(17): Xaa = Any Amino Acid
ACEFCANPXXACXXTGC

SEQ ID NO: 12570 - protein, 17 aa, Artificial Sequence
  Synthetically generated peptide
  VARIANT (1)..(17): Xaa = Any Amino Acid
ACEFCANPXXACXTXGC

SEQ ID NO: 12571 - protein, 17 aa, Artificial Sequence
  Synthetically generated peptide
  VARIANT (1)..(17): Xaa = Any Amino Acid
ACEFCANPXXACXTGXC

SEQ ID NO: 12572 - protein, 16 aa, Artificial Sequence
  Synthetically generated peptide
  VARIANT (1)..(16): Xaa = Any Amino Acid
ACEFCANPXXACTXGC

SEQ ID NO: 12573 - protein, 17 aa, Artificial Sequence
  Synthetically generated peptide
  VARIANT (1)..(17): Xaa = Any Amino Acid
ACEFCANPXXACTXXGC

SEQ ID NO: 12574 - protein, 17 aa, Artificial Sequence
  Synthetically generated peptide
  VARIANT (1)..(17): Xaa = Any Amino Acid
ACEFCANPXXACTXGXC

SEQ ID NO: 12575 - protein, 16 aa, Artificial Sequence
  Synthetically generated peptide
  VARIANT (1)..(16): Xaa = Any Amino Acid
ACEFCANPXXACTGXC

SEQ ID NO: 12576 - protein, 17 aa, Artificial Sequence
  Synthetically generated peptide
  VARIANT (1)..(17): Xaa = Any Amino Acid
ACEFCANPXXACTGXXC

SEQ ID NO: 12577 - protein, 15 aa, Artificial Sequence
  Synthetically generated peptide
  VARIANT (1)..(15): Xaa = Any Amino Acid
ACEFCANPXAXCTGC

SEQ ID NO: 12578 - protein, 16 aa, Artificial Sequence
  Synthetically generated peptide
  VARIANT (1)..(16): Xaa = Any Amino Acid
ACEFCANPXAXXCTGC

SEQ ID NO: 12579 - protein, 17 aa, Artificial Sequence
  Synthetically generated peptide
  VARIANT (1)..(17): Xaa = Any Amino Acid
ACEFCANPXAXXXCTGC

SEQ ID NO: 12580 - protein, 17 aa, Artificial Sequence
  Synthetically generated peptide
  VARIANT (1)..(17): Xaa = Any Amino Acid
ACEFCANPXAXXCXTGC

SEQ ID NO: 12581 - protein, 17 aa, Artificial Sequence
  Synthetically generated peptide
  VARIANT (1)..(17): Xaa = Any Amino Acid
ACEFCANPXAXXCTXGC

SEQ ID NO: 12582 - protein, 17 aa, Artificial Sequence
  Synthetically generated peptide
  VARIANT (1)..(17): Xaa = Any Amino Acid
ACEFCANPXAXXCTGXC

SEQ ID NO: 12583 - protein, 16 aa, Artificial Sequence
  Synthetically generated peptide
  VARIANT (1)..(16): Xaa = Any Amino Acid
ACEFCANPXAXCXTGC

SEQ ID NO: 12584 - protein, 17 aa, Artificial Sequence
  Synthetically generated peptide
  VARIANT (1)..(17): Xaa = Any Amino Acid
ACEFCANPXAXCXXTGC

SEQ ID NO: 12585 - protein, 17 aa, Artificial Sequence
  Synthetically generated peptide
  VARIANT (1)..(17): Xaa = Any Amino Acid
ACEFCANPXAXCXTXGC

SEQ ID NO: 12586 - protein, 17 aa, Artificial Sequence
  Synthetically generated peptide
  VARIANT (1)..(17): Xaa = Any Amino Acid
ACEFCANPXAXCXTGXC

SEQ ID NO: 12587 - protein, 16 aa, Artificial Sequence
  Synthetically generated peptide
  VARIANT (1)..(16): Xaa = Any Amino Acid
ACEFCANPXAXCTXGC

SEQ ID NO: 12588 - protein, 17 aa, Artificial Sequence
  Synthetically generated peptide
  VARIANT (1)..(17): Xaa = Any Amino Acid
ACEFCANPXAXCTXXGC

SEQ ID NO: 12589 - protein, 17 aa, Artificial Sequence
  Synthetically generated peptide
  VARIANT (1)..(17): Xaa = Any Amino Acid
ACEFCANPXAXCTXGXC

SEQ ID NO: 12590 - protein, 16 aa, Artificial Sequence
  Synthetically generated peptide
  VARIANT (1)..(16): Xaa = Any Amino Acid
ACEFCANPXAXCTGXC

SEQ ID NO: 12591 - protein, 17 aa, Artificial Sequence
  Synthetically generated peptide
  VARIANT (1)..(17): Xaa = Any Amino Acid
ACEFCANPXAXCTGXXC

SEQ ID NO: 12592 - protein, 15 aa, Artificial Sequence
  Synthetically generated peptide
  VARIANT (1)..(15): Xaa = Any Amino Acid
ACEFCANPXACXTGC

SEQ ID NO: 12593 - protein, 16 aa, Artificial Sequence
  Synthetically generated peptide
  VARIANT (1)..(16): Xaa = Any Amino Acid
ACEFCANPXACXXTGC

SEQ ID NO: 12594 - protein, 17 aa, Artificial Sequence
  Synthetically generated peptide
  VARIANT (1)..(17): Xaa = Any Amino Acid
ACEFCANPXACXXXTGC

SEQ ID NO: 12595 - protein, 17 aa, Artificial Sequence
  Synthetically generated peptide
  VARIANT (1)..(17): Xaa = Any Amino Acid
ACEFCANPXACXXTXGC

SEQ ID NO: 12596 - protein, 17 aa, Artificial Sequence
  Synthetically generated peptide
  VARIANT (1)..(17): Xaa = Any Amino Acid
ACEFCANPXACXXTGXC

SEQ ID NO: 12597 - protein, 16 aa, Artificial Sequence
  Synthetically generated peptide
  VARIANT (1)..(16): Xaa = Any Amino Acid
ACEFCANPXACXTXGC

SEQ ID NO: 12598 - protein, 17 aa, Artificial Sequence
  Synthetically generated peptide
  VARIANT (1)..(17): Xaa = Any Amino Acid
ACEFCANPXACXTXXGC

SEQ ID NO: 12599 - protein, 17 aa, Artificial Sequence
  Synthetically generated peptide
  VARIANT (1)..(17): Xaa = Any Amino Acid
ACEFCANPXACXTXGXC

SEQ ID NO: 12600 - protein, 16 aa, Artificial Sequence
  Synthetically generated peptide
  VARIANT (1)..(16): Xaa = Any Amino Acid
ACEFCANPXACXTGXC

SEQ ID NO: 12601 - protein, 17 aa, Artificial Sequence
  Synthetically generated peptide
  VARIANT (1)..(17): Xaa = Any Amino Acid
ACEFCANPXACXTGXXC

SEQ ID NO: 12602 - protein, 15 aa, Artificial Sequence
  Synthetically generated peptide
  VARIANT (1)..(15): Xaa = Any Amino Acid
ACEFCANPXACTXGC

SEQ ID NO: 12603 - protein, 16 aa, Artificial Sequence
  Synthetically generated peptide
  VARIANT (1)..(16): Xaa = Any Amino Acid
ACEFCANPXACTXXGC

SEQ ID NO: 12604 - protein, 17 aa, Artificial Sequence
  Synthetically generated peptide
  VARIANT (1)..(17): Xaa = Any Amino Acid
ACEFCANPXACTXXXGC

SEQ ID NO: 12605 - protein, 17 aa, Artificial Sequence
  Synthetically generated peptide
  VARIANT (1)..(17): Xaa = Any Amino Acid
ACEFCANPXACTXXGXC

SEQ ID NO: 12606 - protein, 16 aa, Artificial Sequence
  Synthetically generated peptide
  VARIANT (1)..(16): Xaa = Any Amino Acid
ACEFCANPXACTXGXC

SEQ ID NO: 12607 - protein, 17 aa, Artificial Sequence
  Synthetically generated peptide
  VARIANT (1)..(17): Xaa = Any Amino Acid
ACEFCANPXACTXGXXC

SEQ ID NO: 12608 - protein, 15 aa, Artificial Sequence
  Synthetically generated peptide
  VARIANT (1)..(15): Xaa = Any Amino Acid
ACEFCANPXACTGXC

SEQ ID NO: 12609 - protein, 16 aa, Artificial Sequence
  Synthetically generated peptide
  VARIANT (1)..(16): Xaa = Any Amino Acid
ACEFCANPXACTGXXC

SEQ ID NO: 12610 - protein, 17 aa, Artificial Sequence
  Synthetically generated peptide
  VARIANT (1)..(17): Xaa = Any Amino Acid
ACEFCANPXACTGXXXC

SEQ ID NO: 12611 - protein, 14 aa, Artificial Sequence
  Synthetically generated peptide
  VARIANT (1)..(14): Xaa = Any Amino Acid
ACEFCANPAXCTGC

SEQ ID NO: 12612 - protein, 15 aa, Artificial Sequence
  Synthetically generated peptide
  VARIANT (1)..(15): Xaa = Any Amino Acid
ACEFCANPAXXCTGC

SEQ ID NO: 12613 - protein, 16 aa, Artificial Sequence
  Synthetically generated peptide
  VARIANT (1)..(16): Xaa = Any Amino Acid
ACEFCANPAXXXCTGC

SEQ ID NO: 12614 - protein, 17 aa, Artificial Sequence
  Synthetically generated peptide
  VARIANT (1)..(17): Xaa = Any Amino Acid
ACEFCANPAXXXXCTGC

SEQ ID NO: 12615 - protein, 17 aa, Artificial Sequence
  Synthetically generated peptide
  VARIANT (1)..(17): Xaa = Any Amino Acid
ACEFCANPAXXXCXTGC

SEQ ID NO: 12616 - protein, 17 aa, Artificial Sequence
  Synthetically generated peptide
  VARIANT (1)..(17): Xaa = Any Amino Acid
ACEFCANPAXXXCTXGC

SEQ ID NO: 12617 - protein, 17 aa, Artificial Sequence
  Synthetically generated peptide
  VARIANT (1)..(17): Xaa = Any Amino Acid
ACEFCANPAXXXCTGXC

SEQ ID NO: 12618 - protein, 16 aa, Artificial Sequence
  Synthetically generated peptide
  VARIANT (1)..(16): Xaa = Any Amino Acid
ACEFCANPAXXCXTGC

SEQ ID NO: 12619 - protein, 17 aa, Artificial Sequence
  Synthetically generated peptide
  VARIANT (1)..(17): Xaa = Any Amino Acid
ACEFCANPAXXCXXTGC

SEQ ID NO: 12620 - protein, 17 aa, Artificial Sequence
  Synthetically generated peptide
  VARIANT (1)..(17): Xaa = Any Amino Acid
ACEFCANPAXXCXTXGC

SEQ ID NO: 12621 - protein, 17 aa, Artificial Sequence
  Synthetically generated peptide
  VARIANT (1)..(17): Xaa = Any Amino Acid
ACEFCANPAXXCXTGXC

SEQ ID NO: 12622 - protein, 16 aa, Artificial Sequence
  Synthetically generated peptide
  VARIANT (1)..(16): Xaa = Any Amino Acid
ACEFCANPAXXCTXGC

SEQ ID NO: 12623 - protein, 17 aa, Artificial Sequence
  Synthetically generated peptide
  VARIANT (1)..(17): Xaa = Any Amino Acid
ACEFCANPAXXCTXXGC

SEQ ID NO: 12624 - protein, 17 aa, Artificial Sequence
  Synthetically generated peptide
  VARIANT (1)..(17): Xaa = Any Amino Acid
ACEFCANPAXXCTXGXC

SEQ ID NO: 12625 - protein, 16 aa, Artificial Sequence
  Synthetically generated peptide
  VARIANT (1)..(16): Xaa = Any Amino Acid
ACEFCANPAXXCTGXC

SEQ ID NO: 12626 - protein, 17 aa, Artificial Sequence
  Synthetically generated peptide
  VARIANT (1)..(17): Xaa = Any Amino Acid
ACEFCANPAXXCTGXXC

SEQ ID NO: 12627 - protein, 15 aa, Artificial Sequence
  Synthetically generated peptide
  VARIANT (1)..(15): Xaa = Any Amino Acid
ACEFCANPAXCXTGC

SEQ ID NO: 12628 - protein, 16 aa, Artificial Sequence
  Synthetically generated peptide
  VARIANT (1)..(16): Xaa = Any Amino Acid
ACEFCANPAXCXXTGC

SEQ ID NO: 12629 - protein, 17 aa, Artificial Sequence
  Synthetically generated peptide
  VARIANT (1)..(17): Xaa = Any Amino Acid
ACEFCANPAXCXXXTGC

SEQ ID NO: 12630 - protein, 17 aa, Artificial Sequence
  Synthetically generated peptide
  VARIANT (1)..(17): Xaa = Any Amino Acid
ACEFCANPAXCXXTXGC

SEQ ID NO: 12631 - protein, 17 aa, Artificial Sequence
  Synthetically generated peptide
  VARIANT (1)..(17): Xaa = Any Amino Acid
ACEFCANPAXCXXTGXC

SEQ ID NO: 12632 - protein, 16 aa, Artificial Sequence
  Synthetically generated peptide
  VARIANT (1)..(16): Xaa = Any Amino Acid
ACEFCANPAXCXTXGC

SEQ ID NO: 12633 - protein, 17 aa, Artificial Sequence
  Synthetically generated peptide
  VARIANT (1)..(17): Xaa = Any Amino Acid
ACEFCANPAXCXTXXGC

SEQ ID NO: 12634 - protein, 17 aa, Artificial Sequence
  Synthetically generated peptide
  VARIANT (1)..(17): Xaa = Any Amino Acid
ACEFCANPAXCXTXGXC

SEQ ID NO: 12635 - protein, 16 aa, Artificial Sequence
  Synthetically generated peptide
  VARIANT (1)..(16): Xaa = Any Amino Acid
ACEFCANPAXCXTGXC

SEQ ID NO: 12636 - protein, 17 aa, Artificial Sequence
  Synthetically generated peptide
  VARIANT (1)..(17): Xaa = Any Amino Acid
ACEFCANPAXCXTGXXC

SEQ ID NO: 12637 - protein, 15 aa, Artificial Sequence
  Synthetically generated peptide
  VARIANT (1)..(15): Xaa = Any Amino Acid
ACEFCANPAXCTXGC

SEQ ID NO: 12638 - protein, 16 aa, Artificial Sequence
  Synthetically generated peptide
  VARIANT (1)..(16): Xaa = Any Amino Acid
ACEFCANPAXCTXXGC

SEQ ID NO: 12639 - protein, 17 aa, Artificial Sequence
  Synthetically generated peptide
  VARIANT (1)..(17): Xaa = Any Amino Acid
ACEFCANPAXCTXXXGC

SEQ ID NO: 12640 - protein, 17 aa, Artificial Sequence
  Synthetically generated peptide
  VARIANT (1)..(17): Xaa = Any Amino Acid
ACEFCANPAXCTXXGXC

SEQ ID NO: 12641 - protein, 16 aa, Artificial Sequence
  Synthetically generated peptide
  VARIANT (1)..(16): Xaa = Any Amino Acid
ACEFCANPAXCTXGXC

SEQ ID NO: 12642 - protein, 17 aa, Artificial Sequence
  Synthetically generated peptide
  VARIANT (1)..(17): Xaa = Any Amino Acid
ACEFCANPAXCTXGXXC

SEQ ID NO: 12643 - protein, 15 aa, Artificial Sequence
  Synthetically generated peptide
  VARIANT (1)..(15): Xaa = Any Amino Acid
ACEFCANPAXCTGXC

SEQ ID NO: 12644 - protein, 16 aa, Artificial Sequence
  Synthetically generated peptide
  VARIANT (1)..(16): Xaa = Any Amino Acid
ACEFCANPAXCTGXXC

SEQ ID NO: 12645 - protein, 17 aa, Artificial Sequence
  Synthetically generated peptide
  VARIANT (1)..(17): Xaa = Any Amino Acid
ACEFCANPAXCTGXXXC

SEQ ID NO: 12646 - protein, 14 aa, Artificial Sequence
  Synthetically generated peptide
  VARIANT (1)..(14): Xaa = Any Amino Acid
ACEFCANPACXTGC

SEQ ID NO: 12647 - protein, 15 aa, Artificial Sequence
  Synthetically generated peptide
  VARIANT (1)..(15): Xaa = Any Amino Acid
ACEFCANPACXXTGC

SEQ ID NO: 12648 - protein, 16 aa, Artificial Sequence
  Synthetically generated peptide
  VARIANT (1)..(16): Xaa = Any Amino Acid
ACEFCANPACXXXTGC

SEQ ID NO: 12649 - protein, 17 aa, Artificial Sequence
  Synthetically generated peptide
  VARIANT (1)..(17): Xaa = Any Amino Acid
ACEFCANPACXXXXTGC

SEQ ID NO: 12650 - protein, 17 aa, Artificial Sequence
  Synthetically generated peptide
  VARIANT (1)..(17): Xaa = Any Amino Acid
ACEFCANPACXXXTXGC

SEQ ID NO: 12651 - protein, 17 aa, Artificial Sequence
  Synthetically generated peptide
  VARIANT (1)..(17): Xaa = Any Amino Acid
ACEFCANPACXXXTGXC

SEQ ID NO: 12652 - protein, 16 aa, Artificial Sequence
  Synthetically generated peptide
  VARIANT (1)..(16): Xaa = Any Amino Acid
ACEFCANPACXXTXGC

SEQ ID NO: 12653 - protein, 17 aa, Artificial Sequence
  Synthetically generated peptide
  VARIANT (1)..(17): Xaa = Any Amino Acid
ACEFCANPACXXTXXGC

SEQ ID NO: 12654 - protein, 17 aa, Artificial Sequence
  Synthetically generated peptide
  VARIANT (1)..(17): Xaa = Any Amino Acid
ACEFCANPACXXTXGXC

SEQ ID NO: 12655 - protein, 16 aa, Artificial Sequence
  Synthetically generated peptide
  VARIANT (1)..(16): Xaa = Any Amino Acid
ACEFCANPACXXTGXC

SEQ ID NO: 12656 - protein, 17 aa, Artificial Sequence
  Synthetically generated peptide
  VARIANT (1)..(17): Xaa = Any Amino Acid
ACEFCANPACXXTGXXC

SEQ ID NO: 12657 - protein, 15 aa, Artificial Sequence
  Synthetically generated peptide
  VARIANT (1)..(15): Xaa = Any Amino Acid
ACEFCANPACXTXGC

SEQ ID NO: 12658 - protein, 16 aa, Artificial Sequence
  Synthetically generated peptide
  VARIANT (1)..(16): Xaa = Any Amino Acid
ACEFCANPACXTXXGC

SEQ ID NO: 12659 - protein, 17 aa, Artificial Sequence
  Synthetically generated peptide
  VARIANT (1)..(17): Xaa = Any Amino Acid
ACEFCANPACXTXXXGC

SEQ ID NO: 12660 - protein, 17 aa, Artificial Sequence
  Synthetically generated peptide
  VARIANT (1)..(17): Xaa = Any Amino Acid
ACEFCANPACXTXXGXC

SEQ ID NO: 12661 - protein, 16 aa, Artificial Sequence
  Synthetically generated peptide
  VARIANT (1)..(16): Xaa = Any Amino Acid
ACEFCANPACXTXGXC

SEQ ID NO: 12662 - protein, 17 aa, Artificial Sequence
  Synthetically generated peptide
  VARIANT (1)..(17): Xaa = Any Amino Acid
ACEFCANPACXTXGXXC

SEQ ID NO: 12663 - protein, 15 aa, Artificial Sequence
  Synthetically generated peptide
  VARIANT (1)..(15): Xaa = Any Amino Acid
ACEFCANPACXTGXC

SEQ ID NO: 12664 - protein, 16 aa, Artificial Sequence
  Synthetically generated peptide
  VARIANT (1)..(16): Xaa = Any Amino Acid
ACEFCANPACXTGXXC

SEQ ID NO: 12665 - protein, 17 aa, Artificial Sequence
  Synthetically generated peptide
  VARIANT (1)..(17): Xaa = Any Amino Acid
ACEFCANPACXTGXXXC

SEQ ID NO: 12666 - protein, 14 aa, Artificial Sequence
  Synthetically generated peptide
  VARIANT (1)..(14): Xaa = Any Amino Acid
ACEFCANPACTXGC

SEQ ID NO: 12667 - protein, 15 aa, Artificial Sequence
  Synthetically generated peptide
  VARIANT (1)..(15): Xaa = Any Amino Acid
ACEFCANPACTXXGC

SEQ ID NO: 12668 - protein, 16 aa, Artificial Sequence
  Synthetically generated peptide
  VARIANT (1)..(16): Xaa = Any Amino Acid
ACEFCANPACTXXXGC

SEQ ID NO: 12669 - protein, 17 aa, Artificial Sequence
  Synthetically generated peptide
  VARIANT (1)..(17): Xaa = Any Amino Acid
ACEFCANPACTXXXXGC

SEQ ID NO: 12670 - protein, 17 aa, Artificial Sequence
  Synthetically generated peptide
  VARIANT (1)..(17): Xaa = Any Amino Acid
ACEFCANPACTXXXGXC

SEQ ID NO: 12671 - protein, 16 aa, Artificial Sequence
  Synthetically generated peptide
  VARIANT (1)..(16): Xaa = Any Amino Acid
ACEFCANPACTXXGXC

SEQ ID NO: 12672 - protein, 17 aa, Artificial Sequence
  Synthetically generated peptide
  VARIANT (1)..(17): Xaa = Any Amino Acid
ACEFCANPACTXXGXXC

SEQ ID NO: 12673 - protein, 15 aa, Artificial Sequence
  Synthetically generated peptide
  VARIANT (1)..(15): Xaa = Any Amino Acid
ACEFCANPACTXGXC

SEQ ID NO: 12674 - protein, 16 aa, Artificial Sequence
  Synthetically generated peptide
  VARIANT (1)..(16): Xaa = Any Amino Acid
ACEFCANPACTXGXXC

SEQ ID NO: 12675 - protein, 17 aa, Artificial Sequence
  Synthetically generated peptide
  VARIANT (1)..(17): Xaa = Any Amino Acid
ACEFCANPACTXGXXXC

SEQ ID NO: 12676 - protein, 14 aa, Artificial Sequence
  Synthetically generated peptide
  VARIANT (1)..(14): Xaa = Any Amino Acid
ACEFCANPACTGXC

SEQ ID NO: 12677 - protein, 15 aa, Artificial Sequence
  Synthetically generated peptide
  VARIANT (1)..(15): Xaa = Any Amino Acid
ACEFCANPACTGXXC

SEQ ID NO: 12678 - protein, 16 aa, Artificial Sequence
  Synthetically generated peptide
  VARIANT (1)..(16): Xaa = Any Amino Acid
ACEFCANPACTGXXXC

SEQ ID NO: 12679 - protein, 17 aa, Artificial Sequence
  Synthetically generated peptide
  VARIANT (1)..(17): Xaa = Any Amino Acid
ACEFCANPACTGXXXXC

SEQ ID NO: 12680 - protein, 14 aa, Artificial Sequence
  Synthetically generated peptide
  VARIANT (1)..(14): Xaa = Any Amino Acid
CCXEFACNPACTGA

SEQ ID NO: 12681 - protein, 15 aa, Artificial Sequence
  Synthetically generated peptide
  VARIANT (1)..(15): Xaa = Any Amino Acid
CCXXEFACNPACTGA

SEQ ID NO: 12682 - protein, 16 aa, Artificial Sequence
  Synthetically generated peptide
  VARIANT (1)..(16): Xaa = Any Amino Acid
CCXXXEFACNPACTGA

SEQ ID NO: 12683 - protein, 17 aa, Artificial Sequence
  Synthetically generated peptide
  VARIANT (1)..(17): Xaa = Any Amino Acid
CCXXXXEFACNPACTGA

SEQ ID NO: 12684 - protein, 17 aa, Artificial Sequence
  Synthetically generated peptide
  VARIANT (1)..(17): Xaa = Any Amino Acid
CCXXXEXFACNPACTGA

SEQ ID NO: 12685 - protein, 17 aa, Artificial Sequence
  Synthetically generated peptide
  VARIANT (1)..(17): Xaa = Any Amino Acid
CCXXXEFXACNPACTGA

SEQ ID NO: 12686 - protein, 17 aa, Artificial Sequence
  Synthetically generated peptide
  VARIANT (1)..(17): Xaa = Any Amino Acid
CCXXXEFACXNPACTGA

SEQ ID NO: 12687 - protein, 17 aa, Artificial Sequence
  Synthetically generated peptide
  VARIANT (1)..(17): Xaa = Any Amino Acid
CCXXXEFACNXPACTGA

SEQ ID NO: 12688 - protein, 17 aa, Artificial Sequence
  Synthetically generated peptide
  VARIANT (1)..(17): Xaa = Any Amino Acid
CCXXXEFACNPXACTGA

SEQ ID NO: 12689 - protein, 17 aa, Artificial Sequence
  Synthetically generated peptide
  VARIANT (1)..(17): Xaa = Any Amino Acid
CCXXXEFACNPAXCTGA

SEQ ID NO: 12690 - protein, 17 aa, Artificial Sequence
  Synthetically generated peptide
  VARIANT (1)..(17): Xaa = Any Amino Acid
CCXXXEFACNPACXTGA

SEQ ID NO: 12691 - protein, 17 aa, Artificial Sequence
  Synthetically generated peptide
  VARIANT (1)..(17): Xaa = Any Amino Acid
CCXXXEFACNPACTXGA

SEQ ID NO: 12692 - protein, 17 aa, Artificial Sequence
  Synthetically generated peptide
  VARIANT (1)..(17): Xaa = Any Amino Acid
CCXXXEFACNPACTGXA

SEQ ID NO: 12693 - protein, 16 aa, Artificial Sequence
  Synthetically generated peptide
  VARIANT (1)..(16): Xaa = Any Amino Acid
CCXXEXFACNPACTGA

SEQ ID NO: 12694 - protein, 17 aa, Artificial Sequence
  Synthetically generated peptide
  VARIANT (1)..(17): Xaa = Any Amino Acid
CCXXEXXFACNPACTGA

SEQ ID NO: 12695 - protein, 17 aa, Artificial Sequence
  Synthetically generated peptide
  VARIANT (1)..(17): Xaa = Any Amino Acid
CCXXEXFXACNPACTGA

SEQ ID NO: 12696 - protein, 17 aa, Artificial Sequence
  Synthetically generated peptide
  VARIANT (1)..(17): Xaa = Any Amino Acid
CCXXEXFACXNPACTGA

SEQ ID NO: 12697 - protein, 17 aa, Artificial Sequence
  Synthetically generated peptide
  VARIANT (1)..(17): Xaa = Any Amino Acid
CCXXEXFACNXPACTGA

SEQ ID NO: 12698 - protein, 17 aa, Artificial Sequence
  Synthetically generated peptide
  VARIANT (1)..(17): Xaa = Any Amino Acid
CCXXEXFACNPXACTGA

SEQ ID NO: 12699 - protein, 17 aa, Artificial Sequence
  Synthetically generated peptide
  VARIANT (1)..(17): Xaa = Any Amino Acid
CCXXEXFACNPAXCTGA

SEQ ID NO: 12700 - protein, 17 aa, Artificial Sequence
  Synthetically generated peptide
  VARIANT (1)..(17): Xaa = Any Amino Acid
CCXXEXFACNPACXTGA

SEQ ID NO: 12701 - protein, 17 aa, Artificial Sequence
  Synthetically generated peptide
  VARIANT (1)..(17): Xaa = Any Amino Acid
CCXXEXFACNPACTXGA

SEQ ID NO: 12702 - protein, 17 aa, Artificial Sequence
  Synthetically generated peptide
  VARIANT (1)..(17): Xaa = Any Amino Acid
CCXXEXFACNPACTGXA

SEQ ID NO: 12703 - protein, 16 aa, Artificial Sequence
  Synthetically generated peptide
  VARIANT (1)..(16): Xaa = Any Amino Acid
CCXXEFXACNPACTGA

SEQ ID NO: 12704 - protein, 17 aa, Artificial Sequence
  Synthetically generated peptide
  VARIANT (1)..(17): Xaa = Any Amino Acid
CCXXEFXXACNPACTGA

SEQ ID NO: 12705 - protein, 17 aa, Artificial Sequence
  Synthetically generated peptide
  VARIANT (1)..(17): Xaa = Any Amino Acid
CCXXEFXACXNPACTGA

SEQ ID NO: 12706 - protein, 17 aa, Artificial Sequence
  Synthetically generated peptide
  VARIANT (1)..(17): Xaa = Any Amino Acid
CCXXEFXACNXPACTGA

SEQ ID NO: 12707 - protein, 17 aa, Artificial Sequence
  Synthetically generated peptide
  VARIANT (1)..(17): Xaa = Any Amino Acid
CCXXEFXACNPXACTGA

SEQ ID NO: 12708 - protein, 17 aa, Artificial Sequence
  Synthetically generated peptide
  VARIANT (1)..(17): Xaa = Any Amino Acid
CCXXEFXACNPAXCTGA

SEQ ID NO: 12709 - protein, 17 aa, Artificial Sequence
  Synthetically generated peptide
  VARIANT (1)..(17): Xaa = Any Amino Acid
CCXXEFXACNPACXTGA

SEQ ID NO: 12710 - protein, 17 aa, Artificial Sequence
  Synthetically generated peptide
  VARIANT (1)..(17): Xaa = Any Amino Acid
CCXXEFXACNPACTXGA

SEQ ID NO: 12711 - protein, 17 aa, Artificial Sequence
  Synthetically generated peptide
  VARIANT (1)..(17): Xaa = Any Amino Acid
CCXXEFXACNPACTGXA

SEQ ID NO: 12712 - protein, 16 aa, Artificial Sequence
  Synthetically generated peptide
  VARIANT (1)..(16): Xaa = Any Amino Acid
CCXXEFACXNPACTGA

SEQ ID NO: 12713 - protein, 17 aa, Artificial Sequence
  Synthetically generated peptide
  VARIANT (1)..(17): Xaa = Any Amino Acid
CCXXEFACXXNPACTGA

SEQ ID NO: 12714 - protein, 17 aa, Artificial Sequence
  Synthetically generated peptide
  VARIANT (1)..(17): Xaa = Any Amino Acid
CCXXEFACXNXPACTGA

SEQ ID NO: 12715 - protein, 17 aa, Artificial Sequence
  Synthetically generated peptide
  VARIANT (1)..(17): Xaa = Any Amino Acid
CCXXEFACXNPXACTGA

SEQ ID NO: 12716 - protein, 17 aa, Artificial Sequence
  Synthetically generated peptide
  VARIANT (1)..(17): Xaa = Any Amino Acid
CCXXEFACXNPAXCTGA

SEQ ID NO: 12717 - protein, 17 aa, Artificial Sequence
  Synthetically generated peptide
  VARIANT (1)..(17): Xaa = Any Amino Acid
CCXXEFACXNPACXTGA

SEQ ID NO: 12718 - protein, 17 aa, Artificial Sequence
  Synthetically generated peptide
  VARIANT (1)..(17): Xaa = Any Amino Acid
CCXXEFACXNPACTXGA

SEQ ID NO: 12719 - protein, 17 aa, Artificial Sequence
  Synthetically generated peptide
  VARIANT (1)..(17): Xaa = Any Amino Acid
CCXXEFACXNPACTGXA

SEQ ID NO: 12720 - protein, 16 aa, Artificial Sequence
  Synthetically generated peptide
  VARIANT (1)..(16): Xaa = Any Amino Acid
CCXXEFACNXPACTGA

SEQ ID NO: 12721 - protein, 17 aa, Artificial Sequence
  Synthetically generated peptide
  VARIANT (1)..(17): Xaa = Any Amino Acid
CCXXEFACNXXPACTGA

SEQ ID NO: 12722 - protein, 17 aa, Artificial Sequence
  Synthetically generated peptide
  VARIANT (1)..(17): Xaa = Any Amino Acid
CCXXEFACNXPXACTGA

SEQ ID NO: 12723 - protein, 17 aa, Artificial Sequence
  Synthetically generated peptide
  VARIANT (1)..(17): Xaa = Any Amino Acid
CCXXEFACNXPAXCTGA

SEQ ID NO: 12724 - protein, 17 aa, Artificial Sequence
  Synthetically generated peptide
  VARIANT (1)..(17): Xaa = Any Amino Acid
CCXXEFACNXPACXTGA

SEQ ID NO: 12725 - protein, 17 aa, Artificial Sequence
  Synthetically generated peptide
  VARIANT (1)..(17): Xaa = Any Amino Acid
CCXXEFACNXPACTXGA

SEQ ID NO: 12726 - protein, 17 aa, Artificial Sequence
  Synthetically generated peptide
  VARIANT (1)..(17): Xaa = Any Amino Acid
CCXXEFACNXPACTGXA

SEQ ID NO: 12727 - protein, 16 aa, Artificial Sequence
  Synthetically generated peptide
  VARIANT (1)..(16): Xaa = Any Amino Acid
CCXXEFACNPXACTGA

SEQ ID NO: 12728 - protein, 17 aa, Artificial Sequence
  Synthetically generated peptide
  VARIANT (1)..(17): Xaa = Any Amino Acid
CCXXEFACNPXXACTGA

SEQ ID NO: 12729 - protein, 17 aa, Artificial Sequence
  Synthetically generated peptide
  VARIANT (1)..(17): Xaa = Any Amino Acid
CCXXEFACNPXAXCTGA

SEQ ID NO: 12730 - protein, 17 aa, Artificial Sequence
  Synthetically generated peptide
  VARIANT (1)..(17): Xaa = Any Amino Acid
CCXXEFACNPXACXTGA

SEQ ID NO: 12731 - protein, 17 aa, Artificial Sequence
  Synthetically generated peptide
  VARIANT (1)..(17): Xaa = Any Amino Acid
CCXXEFACNPXACTXGA

SEQ ID NO: 12732 - protein, 17 aa, Artificial Sequence
  Synthetically generated peptide
  VARIANT (1)..(17): Xaa = Any Amino Acid
CCXXEFACNPXACTGXA

SEQ ID NO: 12733 - protein, 16 aa, Artificial Sequence
  Synthetically generated peptide
  VARIANT (1)..(16): Xaa = Any Amino Acid
CCXXEFACNPAXCTGA

SEQ ID NO: 12734 - protein, 17 aa, Artificial Sequence
  Synthetically generated peptide
  VARIANT (1)..(17): Xaa = Any Amino Acid
CCXXEFACNPAXXCTGA

SEQ ID NO: 12735 - protein, 17 aa, Artificial Sequence
  Synthetically generated peptide
  VARIANT (1)..(17): Xaa = Any Amino Acid
CCXXEFACNPAXCXTGA

SEQ ID NO: 12736 - protein, 17 aa, Artificial Sequence
  Synthetically generated peptide
  VARIANT (1)..(17): Xaa = Any Amino Acid
CCXXEFACNPAXCTXGA

SEQ ID NO: 12737 - protein, 17 aa, Artificial Sequence
  Synthetically generated peptide
  VARIANT (1)..(17): Xaa = Any Amino Acid
CCXXEFACNPAXCTGXA

SEQ ID NO: 12738 - protein, 16 aa, Artificial Sequence
  Synthetically generated peptide
  VARIANT (1)..(16): Xaa = Any Amino Acid
CCXXEFACNPACXTGA

SEQ ID NO: 12739 - protein, 17 aa, Artificial Sequence
  Synthetically generated peptide
  VARIANT (1)..(17): Xaa = Any Amino Acid
CCXXEFACNPACXXTGA

SEQ ID NO: 12740 - protein, 17 aa, Artificial Sequence
  Synthetically generated peptide
  VARIANT (1)..(17): Xaa = Any Amino Acid
CCXXEFACNPACXTXGA

SEQ ID NO: 12741 - protein, 17 aa, Artificial Sequence
  Synthetically generated peptide
  VARIANT (1)..(17): Xaa = Any Amino Acid
CCXXEFACNPACXTGXA

SEQ ID NO: 12742 - protein, 16 aa, Artificial Sequence
  Synthetically generated peptide
  VARIANT (1)..(16): Xaa = Any Amino Acid
CCXXEFACNPACTXGA

SEQ ID NO: 12743 - protein, 17 aa, Artificial Sequence
  Synthetically generated peptide
  VARIANT (1)..(17): Xaa = Any Amino Acid
CCXXEFACNPACTXXGA

SEQ ID NO: 12744 - protein, 17 aa, Artificial Sequence
  Synthetically generated peptide
  VARIANT (1)..(17): Xaa = Any Amino Acid
CCXXEFACNPACTXGXA

SEQ ID NO: 12745 - protein, 16 aa, Artificial Sequence
  Synthetically generated peptide
  VARIANT (1)..(16): Xaa = Any Amino Acid
CCXXEFACNPACTGXA

SEQ ID NO: 12746 - protein, 17 aa, Artificial Sequence
  Synthetically generated peptide
  VARIANT (1)..(17): Xaa = Any Amino Acid
CCXXEFACNPACTGXXA

SEQ ID NO: 12747 - protein, 15 aa, Artificial Sequence
  Synthetically generated peptide
  VARIANT (1)..(15): Xaa = Any Amino Acid
CCXEXFACNPACTGA

SEQ ID NO: 12748 - protein, 16 aa, Artificial Sequence
  Synthetically generated peptide
  VARIANT (1)..(16): Xaa = Any Amino Acid
CCXEXXFACNPACTGA

SEQ ID NO: 12749 - protein, 17 aa, Artificial Sequence
  Synthetically generated peptide
  VARIANT (1)..(17): Xaa = Any Amino Acid
CCXEXXXFACNPACTGA

SEQ ID NO: 12750 - protein, 17 aa, Artificial Sequence
  Synthetically generated peptide
  VARIANT (1)..(17): Xaa = Any Amino Acid
CCXEXXFXACNPACTGA

SEQ ID NO: 12751 - protein, 17 aa, Artificial Sequence
  Synthetically generated peptide
  VARIANT (1)..(17): Xaa = Any Amino Acid
CCXEXXFACXNPACTGA

SEQ ID NO: 12752 - protein, 17 aa, Artificial Sequence
  Synthetically generated peptide
  VARIANT (1)..(17): Xaa = Any Amino Acid
CCXEXXFACNXPACTGA

SEQ ID NO: 12753 - protein, 17 aa, Artificial Sequence
  Synthetically generated peptide
  VARIANT (1)..(17): Xaa = Any Amino Acid
CCXEXXFACNPXACTGA

SEQ ID NO: 12754 - protein, 17 aa, Artificial Sequence
  Synthetically generated peptide
  VARIANT (1)..(17): Xaa = Any Amino Acid
CCXEXXFACNPAXCTGA

SEQ ID NO: 12755 - protein, 17 aa, Artificial Sequence
  Synthetically generated peptide
  VARIANT (1)..(17): Xaa = Any Amino Acid
CCXEXXFACNPACXTGA

SEQ ID NO: 12756 - protein, 17 aa, Artificial Sequence
  Synthetically generated peptide
  VARIANT (1)..(17): Xaa = Any Amino Acid
CCXEXXFACNPACTXGA

SEQ ID NO: 12757 - protein, 17 aa, Artificial Sequence
  Synthetically generated peptide
  VARIANT (1)..(17): Xaa = Any Amino Acid
CCXEXXFACNPACTGXA

SEQ ID NO: 12758 - protein, 16 aa, Artificial Sequence
  Synthetically generated peptide
  VARIANT (1)..(16): Xaa = Any Amino Acid
CCXEXFXACNPACTGA

SEQ ID NO: 12759 - protein, 17 aa, Artificial Sequence
  Synthetically generated peptide
  VARIANT (1)..(17): Xaa = Any Amino Acid
CCXEXFXXACNPACTGA

SEQ ID NO: 12760 - protein, 17 aa, Artificial Sequence
  Synthetically generated peptide
  VARIANT (1)..(17): Xaa = Any Amino Acid
CCXEXFXACXNPACTGA

SEQ ID NO: 12761 - protein, 17 aa, Artificial Sequence
  Synthetically generated peptide
  VARIANT (1)..(17): Xaa = Any Amino Acid
CCXEXFXACNXPACTGA

SEQ ID NO: 12762 - protein, 17 aa, Artificial Sequence
  Synthetically generated peptide
  VARIANT (1)..(17): Xaa = Any Amino Acid
CCXEXFXACNPXACTGA

SEQ ID NO: 12763 - protein, 17 aa, Artificial Sequence
  Synthetically generated peptide
  VARIANT (1)..(17): Xaa = Any Amino Acid
CCXEXFXACNPAXCTGA

SEQ ID NO: 12764 - protein, 17 aa, Artificial Sequence
  Synthetically generated peptide
  VARIANT (1)..(17): Xaa = Any Amino Acid
CCXEXFXACNPACXTGA

SEQ ID NO: 12765 - protein, 17 aa, Artificial Sequence
  Synthetically generated peptide
  VARIANT (1)..(17): Xaa = Any Amino Acid
CCXEXFXACNPACTXGA

SEQ ID NO: 12766 - protein, 17 aa, Artificial Sequence
  Synthetically generated peptide
  VARIANT (1)..(17): Xaa = Any Amino Acid
CCXEXFXACNPACTGXA

SEQ ID NO: 12767 - protein, 16 aa, Artificial Sequence
  Synthetically generated peptide
  VARIANT (1)..(16): Xaa = Any Amino Acid
CCXEXFACXNPACTGA

SEQ ID NO: 12768 - protein, 17 aa, Artificial Sequence
  Synthetically generated peptide
  VARIANT (1)..(17): Xaa = Any Amino Acid
CCXEXFACXXNPACTGA

SEQ ID NO: 12769 - protein, 17 aa, Artificial Sequence
  Synthetically generated peptide
  VARIANT (1)..(17): Xaa = Any Amino Acid
CCXEXFACXNXPACTGA

SEQ ID NO: 12770 - protein, 17 aa, Artificial Sequence
  Synthetically generated peptide
  VARIANT (1)..(17): Xaa = Any Amino Acid
CCXEXFACXNPXACTGA

SEQ ID NO: 12771 - protein, 17 aa, Artificial Sequence
  Synthetically generated peptide
  VARIANT (1)..(17): Xaa = Any Amino Acid
CCXEXFACXNPAXCTGA

SEQ ID NO: 12772 - protein, 17 aa, Artificial Sequence
  Synthetically generated peptide
  VARIANT (1)..(17): Xaa = Any Amino Acid
CCXEXFACXNPACXTGA

SEQ ID NO: 12773 - protein, 17 aa, Artificial Sequence
  Synthetically generated peptide
  VARIANT (1)..(17): Xaa = Any Amino Acid
CCXEXFACXNPACTXGA

SEQ ID NO: 12774 - protein, 17 aa, Artificial Sequence
  Synthetically generated peptide
  VARIANT (1)..(17): Xaa = Any Amino Acid
CCXEXFACXNPACTGXA

SEQ ID NO: 12775 - protein, 16 aa, Artificial Sequence
  Synthetically generated peptide
  VARIANT (1)..(16): Xaa = Any Amino Acid
CCXEXFACNXPACTGA

SEQ ID NO: 12776 - protein, 17 aa, Artificial Sequence
  Synthetically generated peptide
  VARIANT (1)..(17): Xaa = Any Amino Acid
CCXEXFACNXXPACTGA

SEQ ID NO: 12777 - protein, 17 aa, Artificial Sequence
  Synthetically generated peptide
  VARIANT (1)..(17): Xaa = Any Amino Acid
CCXEXFACNXPXACTGA

SEQ ID NO: 12778 - protein, 17 aa, Artificial Sequence
  Synthetically generated peptide
  VARIANT (1)..(17): Xaa = Any Amino Acid
CCXEXFACNXPAXCTGA

SEQ ID NO: 12779 - protein, 17 aa, Artificial Sequence
  Synthetically generated peptide
  VARIANT (1)..(17): Xaa = Any Amino Acid
CCXEXFACNXPACXTGA

SEQ ID NO: 12780 - protein, 17 aa, Artificial Sequence
  Synthetically generated peptide
  VARIANT (1)..(17): Xaa = Any Amino Acid
CCXEXFACNXPACTXGA

SEQ ID NO: 12781 - protein, 17 aa, Artificial Sequence
  Synthetically generated peptide
  VARIANT (1)..(17): Xaa = Any Amino Acid
CCXEXFACNXPACTGXA

SEQ ID NO: 12782 - protein, 16 aa, Artificial Sequence
  Synthetically generated peptide
  VARIANT (1)..(16): Xaa = Any Amino Acid
CCXEXFACNPXACTGA

SEQ ID NO: 12783 - protein, 17 aa, Artificial Sequence
  Synthetically generated peptide
  VARIANT (1)..(17): Xaa = Any Amino Acid
CCXEXFACNPXXACTGA

SEQ ID NO: 12784 - protein, 17 aa, Artificial Sequence
  Synthetically generated peptide
  VARIANT (1)..(17): Xaa = Any Amino Acid
CCXEXFACNPXAXCTGA

SEQ ID NO: 12785 - protein, 17 aa, Artificial Sequence
  Synthetically generated peptide
  VARIANT (1)..(17): Xaa = Any Amino Acid
CCXEXFACNPXACXTGA

SEQ ID NO: 12786 - protein, 17 aa, Artificial Sequence
  Synthetically generated peptide
  VARIANT (1)..(17): Xaa = Any Amino Acid
CCXEXFACNPXACTXGA

SEQ ID NO: 12787 - protein, 17 aa, Artificial Sequence
  Synthetically generated peptide
  VARIANT (1)..(17): Xaa = Any Amino Acid
CCXEXFACNPXACTGXA

SEQ ID NO: 12788 - protein, 16 aa, Artificial Sequence
  Synthetically generated peptide
  VARIANT (1)..(16): Xaa = Any Amino Acid
CCXEXFACNPAXCTGA

SEQ ID NO: 12789 - protein, 17 aa, Artificial Sequence
  Synthetically generated peptide
  VARIANT (1)..(17): Xaa = Any Amino Acid
CCXEXFACNPAXXCTGA

SEQ ID NO: 12790 - protein, 17 aa, Artificial Sequence
  Synthetically generated peptide
  VARIANT (1)..(17): Xaa = Any Amino Acid
CCXEXFACNPAXCXTGA

SEQ ID NO: 12791 - protein, 17 aa, Artificial Sequence
  Synthetically generated peptide
  VARIANT (1)..(17): Xaa = Any Amino Acid
CCXEXFACNPAXCTXGA

SEQ ID NO: 12792 - protein, 17 aa, Artificial Sequence
  Synthetically generated peptide
  VARIANT (1)..(17): Xaa = Any Amino Acid
CCXEXFACNPAXCTGXA

SEQ ID NO: 12793 - protein, 16 aa, Artificial Sequence
  Synthetically generated peptide
  VARIANT (1)..(16): Xaa = Any Amino Acid
CCXEXFACNPACXTGA

SEQ ID NO: 12794 - protein, 17 aa, Artificial Sequence
  Synthetically generated peptide
  VARIANT (1)..(17): Xaa = Any Amino Acid
CCXEXFACNPACXXTGA

SEQ ID NO: 12795 - protein, 17 aa, Artificial Sequence
  Synthetically generated peptide
  VARIANT (1)..(17): Xaa = Any Amino Acid
CCXEXFACNPACXTXGA

SEQ ID NO: 12796 - protein, 17 aa, Artificial Sequence
  Synthetically generated peptide
  VARIANT (1)..(17): Xaa = Any Amino Acid
CCXEXFACNPACXTGXA

SEQ ID NO: 12797 - protein, 16 aa, Artificial Sequence
  Synthetically generated peptide
  VARIANT (1)..(16): Xaa = Any Amino Acid
CCXEXFACNPACTXGA

SEQ ID NO: 12798 - protein, 17 aa, Artificial Sequence
  Synthetically generated peptide
  VARIANT (1)..(17): Xaa = Any Amino Acid
CCXEXFACNPACTXXGA

SEQ ID NO: 12799 - protein, 17 aa, Artificial Sequence
  Synthetically generated peptide
  VARIANT (1)..(17): Xaa = Any Amino Acid
CCXEXFACNPACTXGXA

SEQ ID NO: 12800 - protein, 16 aa, Artificial Sequence
  Synthetically generated peptide
  VARIANT (1)..(16): Xaa = Any Amino Acid
CCXEXFACNPACTGXA

SEQ ID NO: 12801 - protein, 17 aa, Artificial Sequence
  Synthetically generated peptide
  VARIANT (1)..(17): Xaa = Any Amino Acid
CCXEXFACNPACTGXXA

SEQ ID NO: 12802 - protein, 15 aa, Artificial Sequence
  Synthetically generated peptide
  VARIANT (1)..(15): Xaa = Any Amino Acid
CCXEFXACNPACTGA

SEQ ID NO: 12803 - protein, 16 aa, Artificial Sequence
  Synthetically generated peptide
  VARIANT (1)..(16): Xaa = Any Amino Acid
CCXEFXXACNPACTGA

SEQ ID NO: 12804 - protein, 17 aa, Artificial Sequence
  Synthetically generated peptide
  VARIANT (1)..(17): Xaa = Any Amino Acid
CCXEFXXXACNPACTGA

SEQ ID NO: 12805 - protein, 17 aa, Artificial Sequence
  Synthetically generated peptide
  VARIANT (1)..(17): Xaa = Any Amino Acid
CCXEFXXACXNPACTGA

SEQ ID NO: 12806 - protein, 17 aa, Artificial Sequence
  Synthetically generated peptide
  VARIANT (1)..(17): Xaa = Any Amino Acid
CCXEFXXACNXPACTGA

SEQ ID NO: 12807 - protein, 17 aa, Artificial Sequence
  Synthetically generated peptide
  VARIANT (1)..(17): Xaa = Any Amino Acid
CCXEFXXACNPXACTGA

SEQ ID NO: 12808 - protein, 17 aa, Artificial Sequence
  Synthetically generated peptide
  VARIANT (1)..(17): Xaa = Any Amino Acid
CCXEFXXACNPAXCTGA

SEQ ID NO: 12809 - protein, 17 aa, Artificial Sequence
  Synthetically generated peptide
  VARIANT (1)..(17): Xaa = Any Amino Acid
CCXEFXXACNPACXTGA

SEQ ID NO: 12810 - protein, 17 aa, Artificial Sequence
  Synthetically generated peptide
  VARIANT (1)..(17): Xaa = Any Amino Acid
CCXEFXXACNPACTXGA

SEQ ID NO: 12811 - protein, 17 aa, Artificial Sequence
  Synthetically generated peptide
  VARIANT (1)..(17): Xaa = Any Amino Acid
CCXEFXXACNPACTGXA

SEQ ID NO: 12812 - protein, 16 aa, Artificial Sequence
  Synthetically generated peptide
  VARIANT (1)..(16): Xaa = Any Amino Acid
CCXEFXACXNPACTGA

SEQ ID NO: 12813 - protein, 17 aa, Artificial Sequence
  Synthetically generated peptide
  VARIANT (1)..(17): Xaa = Any Amino Acid
CCXEFXACXXNPACTGA

SEQ ID NO: 12814 - protein, 17 aa, Artificial Sequence
  Synthetically generated peptide
  VARIANT (1)..(17): Xaa = Any Amino Acid
CCXEFXACXNXPACTGA

SEQ ID NO: 12815 - protein, 17 aa, Artificial Sequence
  Synthetically generated peptide
  VARIANT (1)..(17): Xaa = Any Amino Acid
CCXEFXACXNPXACTGA

SEQ ID NO: 12816 - protein, 17 aa, Artificial Sequence
  Synthetically generated peptide
  VARIANT (1)..(17): Xaa = Any Amino Acid
CCXEFXACXNPAXCTGA

SEQ ID NO: 12817 - protein, 17 aa, Artificial Sequence
  Synthetically generated peptide
  VARIANT (1)..(17): Xaa = Any Amino Acid
CCXEFXACXNPACXTGA

SEQ ID NO: 12818 - protein, 17 aa, Artificial Sequence
  Synthetically generated peptide
  VARIANT (1)..(17): Xaa = Any Amino Acid
CCXEFXACXNPACTXGA

SEQ ID NO: 12819 - protein, 17 aa, Artificial Sequence
  Synthetically generated peptide
  VARIANT (1)..(17): Xaa = Any Amino Acid
CCXEFXACXNPACTGXA

SEQ ID NO: 12820 - protein, 16 aa, Artificial Sequence
  Synthetically generated peptide
  VARIANT (1)..(16): Xaa = Any Amino Acid
CCXEFXACNXPACTGA

SEQ ID NO: 12821 - protein, 17 aa, Artificial Sequence
  Synthetically generated peptide
  VARIANT (1)..(17): Xaa = Any Amino Acid
CCXEFXACNXXPACTGA

SEQ ID NO: 12822 - protein, 17 aa, Artificial Sequence
  Synthetically generated peptide
  VARIANT (1)..(17): Xaa = Any Amino Acid
CCXEFXACNXPXACTGA

SEQ ID NO: 12823 - protein, 17 aa, Artificial Sequence
  Synthetically generated peptide
  VARIANT (1)..(17): Xaa = Any Amino Acid
CCXEFXACNXPAXCTGA

SEQ ID NO: 12824 - protein, 17 aa, Artificial Sequence
  Synthetically generated peptide
  VARIANT (1)..(17): Xaa = Any Amino Acid
CCXEFXACNXPACXTGA

SEQ ID NO: 12825 - protein, 17 aa, Artificial Sequence
  Synthetically generated peptide
  VARIANT (1)..(17): Xaa = Any Amino Acid
CCXEFXACNXPACTXGA

SEQ ID NO: 12826 - protein, 17 aa, Artificial Sequence
  Synthetically generated peptide
  VARIANT (1)..(17): Xaa = Any Amino Acid
CCXEFXACNXPACTGXA

SEQ ID NO: 12827 - protein, 16 aa, Artificial Sequence
  Synthetically generated peptide
  VARIANT (1)..(16): Xaa = Any Amino Acid
CCXEFXACNPXACTGA

SEQ ID NO: 12828 - protein, 17 aa, Artificial Sequence
  Synthetically generated peptide
  VARIANT (1)..(17): Xaa = Any Amino Acid
CCXEFXACNPXXACTGA

SEQ ID NO: 12829 - protein, 17 aa, Artificial Sequence
  Synthetically generated peptide
  VARIANT (1)..(17): Xaa = Any Amino Acid
CCXEFXACNPXAXCTGA

SEQ ID NO: 12830 - protein, 17 aa, Artificial Sequence
  Synthetically generated peptide
  VARIANT (1)..(17): Xaa = Any Amino Acid
CCXEFXACNPXACXTGA

SEQ ID NO: 12831 - protein, 17 aa, Artificial Sequence
  Synthetically generated peptide
  VARIANT (1)..(17): Xaa = Any Amino Acid
CCXEFXACNPXACTXGA

SEQ ID NO: 12832 - protein, 17 aa, Artificial Sequence
  Synthetically generated peptide
  VARIANT (1)..(17): Xaa = Any Amino Acid
CCXEFXACNPXACTGXA

SEQ ID NO: 12833 - protein, 16 aa, Artificial Sequence
  Synthetically generated peptide
  VARIANT (1)..(16): Xaa = Any Amino Acid
CCXEFXACNPAXCTGA

SEQ ID NO: 12834 - protein, 17 aa, Artificial Sequence
  Synthetically generated peptide
  VARIANT (1)..(17): Xaa = Any Amino Acid
CCXEFXACNPAXXCTGA

SEQ ID NO: 12835 - protein, 17 aa, Artificial Sequence
  Synthetically generated peptide
  VARIANT (1)..(17): Xaa = Any Amino Acid
CCXEFXACNPAXCXTGA

SEQ ID NO: 12836 - protein, 17 aa, Artificial Sequence
  Synthetically generated peptide
  VARIANT (1)..(17): Xaa = Any Amino Acid
CCXEFXACNPAXCTXGA

SEQ ID NO: 12837 - protein, 17 aa, Artificial Sequence
  Synthetically generated peptide
  VARIANT (1)..(17): Xaa = Any Amino Acid
CCXEFXACNPAXCTGXA

SEQ ID NO: 12838 - protein, 16 aa, Artificial Sequence
  Synthetically generated peptide
  VARIANT (1)..(16): Xaa = Any Amino Acid
CCXEFXACNPACXTGA

SEQ ID NO: 12839 - protein, 17 aa, Artificial Sequence
  Synthetically generated peptide
  VARIANT (1)..(17): Xaa = Any Amino Acid
CCXEFXACNPACXXTGA

SEQ ID NO: 12840 - protein, 17 aa, Artificial Sequence
  Synthetically generated peptide
  VARIANT (1)..(17): Xaa = Any Amino Acid
CCXEFXACNPACXTXGA

SEQ ID NO: 12841 - protein, 17 aa, Artificial Sequence
  Synthetically generated peptide
  VARIANT (1)..(17): Xaa = Any Amino Acid
CCXEFXACNPACXTGXA

SEQ ID NO: 12842 - protein, 16 aa, Artificial Sequence
  Synthetically generated peptide
  VARIANT (1)..(16): Xaa = Any Amino Acid
CCXEFXACNPACTXGA

SEQ ID NO: 12843 - protein, 17 aa, Artificial Sequence
  Synthetically generated peptide
  VARIANT (1)..(17): Xaa = Any Amino Acid
CCXEFXACNPACTXXGA

SEQ ID NO: 12844 - protein, 17 aa, Artificial Sequence
  Synthetically generated peptide
  VARIANT (1)..(17): Xaa = Any Amino Acid
CCXEFXACNPACTXGXA

SEQ ID NO: 12845 - protein, 16 aa, Artificial Sequence
  Synthetically generated peptide
  VARIANT (1)..(16): Xaa = Any Amino Acid
CCXEFXACNPACTGXA

SEQ ID NO: 12846 - protein, 17 aa, Artificial Sequence
  Synthetically generated peptide
  VARIANT (1)..(17): Xaa = Any Amino Acid
CCXEFXACNPACTGXXA

SEQ ID NO: 12847 - protein, 15 aa, Artificial Sequence
  Synthetically generated peptide
  VARIANT (1)..(15): Xaa = Any Amino Acid
CCXEFACXNPACTGA

SEQ ID NO: 12848 - protein, 16 aa, Artificial Sequence
  Synthetically generated peptide
  VARIANT (1)..(16): Xaa = Any Amino Acid
CCXEFACXXNPACTGA

SEQ ID NO: 12849 - protein, 17 aa, Artificial Sequence
  Synthetically generated peptide
  VARIANT (1)..(17): Xaa = Any Amino Acid
CCXEFACXXXNPACTGA

SEQ ID NO: 12850 - protein, 17 aa, Artificial Sequence
  Synthetically generated peptide
  VARIANT (1)..(17): Xaa = Any Amino Acid
CCXEFACXXNXPACTGA

SEQ ID NO: 12851 - protein, 17 aa, Artificial Sequence
  Synthetically generated peptide
  VARIANT (1)..(17): Xaa = Any Amino Acid
CCXEFACXXNPXACTGA

SEQ ID NO: 12852 - protein, 17 aa, Artificial Sequence
  Synthetically generated peptide
  VARIANT (1)..(17): Xaa = Any Amino Acid
CCXEFACXXNPAXCTGA

SEQ ID NO: 12853 - protein, 17 aa, Artificial Sequence
  Synthetically generated peptide
  VARIANT (1)..(17): Xaa = Any Amino Acid
CCXEFACXXNPACXTGA

SEQ ID NO: 12854 - protein, 17 aa, Artificial Sequence
  Synthetically generated peptide
  VARIANT (1)..(17): Xaa = Any Amino Acid
CCXEFACXXNPACTXGA

SEQ ID NO: 12855 - protein, 17 aa, Artificial Sequence
  Synthetically generated peptide
  VARIANT (1)..(17): Xaa = Any Amino Acid
CCXEFACXXNPACTGXA

SEQ ID NO: 12856 - protein, 16 aa, Artificial Sequence
  Synthetically generated peptide
  VARIANT (1)..(16): Xaa = Any Amino Acid
CCXEFACXNXPACTGA

SEQ ID NO: 12857 - protein, 17 aa, Artificial Sequence
  Synthetically generated peptide
  VARIANT (1)..(17): Xaa = Any Amino Acid
CCXEFACXNXXPACTGA

SEQ ID NO: 12858 - protein, 17 aa, Artificial Sequence
  Synthetically generated peptide
  VARIANT (1)..(17): Xaa = Any Amino Acid
CCXEFACXNXPXACTGA

SEQ ID NO: 12859 - protein, 17 aa, Artificial Sequence
  Synthetically generated peptide
  VARIANT (1)..(17): Xaa = Any Amino Acid
CCXEFACXNXPAXCTGA

SEQ ID NO: 12860 - protein, 17 aa, Artificial Sequence
  Synthetically generated peptide
  VARIANT (1)..(17): Xaa = Any Amino Acid
CCXEFACXNXPACXTGA

SEQ ID NO: 12861 - protein, 17 aa, Artificial Sequence
  Synthetically generated peptide
  VARIANT (1)..(17): Xaa = Any Amino Acid
CCXEFACXNXPACTXGA

SEQ ID NO: 12862 - protein, 17 aa, Artificial Sequence
  Synthetically generated peptide
  VARIANT (1)..(17): Xaa = Any Amino Acid
CCXEFACXNXPACTGXA

SEQ ID NO: 12863 - protein, 16 aa, Artificial Sequence
  Synthetically generated peptide
  VARIANT (1)..(16): Xaa = Any Amino Acid
CCXEFACXNPXACTGA

SEQ ID NO: 12864 - protein, 17 aa, Artificial Sequence
  Synthetically generated peptide
  VARIANT (1)..(17): Xaa = Any Amino Acid
CCXEFACXNPXXACTGA

SEQ ID NO: 12865 - protein, 17 aa, Artificial Sequence
  Synthetically generated peptide
  VARIANT (1)..(17): Xaa = Any Amino Acid
CCXEFACXNPXAXCTGA

SEQ ID NO: 12866 - protein, 17 aa, Artificial Sequence
  Synthetically generated peptide
  VARIANT (1)..(17): Xaa = Any Amino Acid
CCXEFACXNPXACXTGA

SEQ ID NO: 12867 - protein, 17 aa, Artificial Sequence
  Synthetically generated peptide
  VARIANT (1)..(17): Xaa = Any Amino Acid
CCXEFACXNPXACTXGA

SEQ ID NO: 12868 - protein, 17 aa, Artificial Sequence
  Synthetically generated peptide
  VARIANT (1)..(17): Xaa = Any Amino Acid
CCXEFACXNPXACTGXA

SEQ ID NO: 12869 - protein, 16 aa, Artificial Sequence
  Synthetically generated peptide
  VARIANT (1)..(16): Xaa = Any Amino Acid
CCXEFACXNPAXCTGA

SEQ ID NO: 12870 - protein, 17 aa, Artificial Sequence
  Synthetically generated peptide
  VARIANT (1)..(17): Xaa = Any Amino Acid
CCXEFACXNPAXXCTGA

SEQ ID NO: 12871 - protein, 17 aa, Artificial Sequence
  Synthetically generated peptide
  VARIANT (1)..(17): Xaa = Any Amino Acid
CCXEFACXNPAXCXTGA

SEQ ID NO: 12872 - protein, 17 aa, Artificial Sequence
  Synthetically generated peptide
  VARIANT (1)..(17): Xaa = Any Amino Acid
CCXEFACXNPAXCTXGA

SEQ ID NO: 12873 - protein, 17 aa, Artificial Sequence
  Synthetically generated peptide
  VARIANT (1)..(17): Xaa = Any Amino Acid
CCXEFACXNPAXCTGXA

SEQ ID NO: 12874 - protein, 16 aa, Artificial Sequence
  Synthetically generated peptide
  VARIANT (1)..(16): Xaa = Any Amino Acid
CCXEFACXNPACXTGA

SEQ ID NO: 12875 - protein, 17 aa, Artificial Sequence
  Synthetically generated peptide
  VARIANT (1)..(17): Xaa = Any Amino Acid
CCXEFACXNPACXXTGA

SEQ ID NO: 12876 - protein, 17 aa, Artificial Sequence
  Synthetically generated peptide
  VARIANT (1)..(17): Xaa = Any Amino Acid
CCXEFACXNPACXTXGA

SEQ ID NO: 12877 - protein, 17 aa, Artificial Sequence
  Synthetically generated peptide
  VARIANT (1)..(17): Xaa = Any Amino Acid
CCXEFACXNPACXTGXA

SEQ ID NO: 12878 - protein, 16 aa, Artificial Sequence
  Synthetically generated peptide
  VARIANT (1)..(16): Xaa = Any Amino Acid
CCXEFACXNPACTXGA

SEQ ID NO: 12879 - protein, 17 aa, Artificial Sequence
  Synthetically generated peptide
  VARIANT (1)..(17): Xaa = Any Amino Acid
CCXEFACXNPACTXXGA

SEQ ID NO: 12880 - protein, 17 aa, Artificial Sequence
  Synthetically generated peptide
  VARIANT (1)..(17): Xaa = Any Amino Acid
CCXEFACXNPACTXGXA

SEQ ID NO: 12881 - protein, 16 aa, Artificial Sequence
  Synthetically generated peptide
  VARIANT (1)..(16): Xaa = Any Amino Acid
CCXEFACXNPACTGXA

SEQ ID NO: 12882 - protein, 17 aa, Artificial Sequence
  Synthetically generated peptide
  VARIANT (1)..(17): Xaa = Any Amino Acid
CCXEFACXNPACTGXXA

SEQ ID NO: 12883 - protein, 15 aa, Artificial Sequence
  Synthetically generated peptide
  VARIANT (1)..(15): Xaa = Any Amino Acid
CCXEFACNXPACTGA

SEQ ID NO: 12884 - protein, 16 aa, Artificial Sequence
  Synthetically generated peptide
  VARIANT (1)..(16): Xaa = Any Amino Acid
CCXEFACNXXPACTGA

SEQ ID NO: 12885 - protein, 17 aa, Artificial Sequence
  Synthetically generated peptide
  VARIANT (1)..(17): Xaa = Any Amino Acid
CCXEFACNXXXPACTGA

SEQ ID NO: 12886 - protein, 17 aa, Artificial Sequence
  Synthetically generated peptide
  VARIANT (1)..(17): Xaa = Any Amino Acid
CCXEFACNXXPXACTGA

SEQ ID NO: 12887 - protein, 17 aa, Artificial Sequence
  Synthetically generated peptide
  VARIANT (1)..(17): Xaa = Any Amino Acid
CCXEFACNXXPAXCTGA

SEQ ID NO: 12888 - protein, 17 aa, Artificial Sequence
  Synthetically generated peptide
  VARIANT (1)..(17): Xaa = Any Amino Acid
CCXEFACNXXPACXTGA

SEQ ID NO: 12889 - protein, 17 aa, Artificial Sequence
  Synthetically generated peptide
  VARIANT (1)..(17): Xaa = Any Amino Acid
CCXEFACNXXPACTXGA

SEQ ID NO: 12890 - protein, 17 aa, Artificial Sequence
  Synthetically generated peptide
  VARIANT (1)..(17): Xaa = Any Amino Acid
CCXEFACNXXPACTGXA

SEQ ID NO: 12891 - protein, 16 aa, Artificial Sequence
  Synthetically generated peptide
  VARIANT (1)..(16): Xaa = Any Amino Acid
CCXEFACNXPXACTGA

SEQ ID NO: 12892 - protein, 17 aa, Artificial Sequence
  Synthetically generated peptide
  VARIANT (1)..(17): Xaa = Any Amino Acid
CCXEFACNXPXXACTGA

SEQ ID NO: 12893 - protein, 17 aa, Artificial Sequence
  Synthetically generated peptide
  VARIANT (1)..(17): Xaa = Any Amino Acid
CCXEFACNXPXAXCTGA

SEQ ID NO: 12894 - protein, 17 aa, Artificial Sequence
  Synthetically generated peptide
  VARIANT (1)..(17): Xaa = Any Amino Acid
CCXEFACNXPXACXTGA

SEQ ID NO: 12895 - protein, 17 aa, Artificial Sequence
  Synthetically generated peptide
  VARIANT (1)..(17): Xaa = Any Amino Acid
CCXEFACNXPXACTXGA

SEQ ID NO: 12896 - protein, 17 aa, Artificial Sequence
  Synthetically generated peptide
  VARIANT (1)..(17): Xaa = Any Amino Acid
CCXEFACNXPXACTGXA

SEQ ID NO: 12897 - protein, 16 aa, Artificial Sequence
  Synthetically generated peptide
  VARIANT (1)..(16): Xaa = Any Amino Acid
CCXEFACNXPAXCTGA

SEQ ID NO: 12898 - protein, 17 aa, Artificial Sequence
  Synthetically generated peptide
  VARIANT (1)..(17): Xaa = Any Amino Acid
CCXEFACNXPAXXCTGA

SEQ ID NO: 12899 - protein, 17 aa, Artificial Sequence
  Synthetically generated peptide
  VARIANT (1)..(17): Xaa = Any Amino Acid
CCXEFACNXPAXCXTGA

SEQ ID NO: 12900 - protein, 17 aa, Artificial Sequence
  Synthetically generated peptide
  VARIANT (1)..(17): Xaa = Any Amino Acid
CCXEFACNXPAXCTXGA

SEQ ID NO: 12901 - protein, 17 aa, Artificial Sequence
  Synthetically generated peptide
  VARIANT (1)..(17): Xaa = Any Amino Acid
CCXEFACNXPAXCTGXA

SEQ ID NO: 12902 - protein, 16 aa, Artificial Sequence
  Synthetically generated peptide
  VARIANT (1)..(16): Xaa = Any Amino Acid
CCXEFACNXPACXTGA

SEQ ID NO: 12903 - protein, 17 aa, Artificial Sequence
  Synthetically generated peptide
  VARIANT (1)..(17): Xaa = Any Amino Acid
CCXEFACNXPACXXTGA

SEQ ID NO: 12904 - protein, 17 aa, Artificial Sequence
  Synthetically generated peptide
  VARIANT (1)..(17): Xaa = Any Amino Acid
CCXEFACNXPACXTXGA

SEQ ID NO: 12905 - protein, 17 aa, Artificial Sequence
  Synthetically generated peptide
  VARIANT (1)..(17): Xaa = Any Amino Acid
CCXEFACNXPACXTGXA

SEQ ID NO: 12906 - protein, 16 aa, Artificial Sequence
  Synthetically generated peptide
  VARIANT (1)..(16): Xaa = Any Amino Acid
CCXEFACNXPACTXGA

SEQ ID NO: 12907 - protein, 17 aa, Artificial Sequence
  Synthetically generated peptide
  VARIANT (1)..(17): Xaa = Any Amino Acid
CCXEFACNXPACTXXGA

SEQ ID NO: 12908 - protein, 17 aa, Artificial Sequence
  Synthetically generated peptide
  VARIANT (1)..(17): Xaa = Any Amino Acid
CCXEFACNXPACTXGXA

SEQ ID NO: 12909 - protein, 16 aa, Artificial Sequence
  Synthetically generated peptide
  VARIANT (1)..(16): Xaa = Any Amino Acid
CCXEFACNXPACTGXA

SEQ ID NO: 12910 - protein, 17 aa, Artificial Sequence
  Synthetically generated peptide
  VARIANT (1)..(17): Xaa = Any Amino Acid
CCXEFACNXPACTGXXA

SEQ ID NO: 12911 - protein, 15 aa, Artificial Sequence
  Synthetically generated peptide
  VARIANT (1)..(15): Xaa = Any Amino Acid
CCXEFACNPXACTGA

SEQ ID NO: 12912 - protein, 16 aa, Artificial Sequence
  Synthetically generated peptide
  VARIANT (1)..(16): Xaa = Any Amino Acid
CCXEFACNPXXACTGA

SEQ ID NO: 12913 - protein, 17 aa, Artificial Sequence
  Synthetically generated peptide
  VARIANT (1)..(17): Xaa = Any Amino Acid
CCXEFACNPXXXACTGA

SEQ ID NO: 12914 - protein, 17 aa, Artificial Sequence
  Synthetically generated peptide
  VARIANT (1)..(17): Xaa = Any Amino Acid
CCXEFACNPXXAXCTGA

SEQ ID NO: 12915 - protein, 17 aa, Artificial Sequence
  Synthetically generated peptide
  VARIANT (1)..(17): Xaa = Any Amino Acid
CCXEFACNPXXACXTGA

SEQ ID NO: 12916 - protein, 17 aa, Artificial Sequence
  Synthetically generated peptide
  VARIANT (1)..(17): Xaa = Any Amino Acid
CCXEFACNPXXACTXGA

SEQ ID NO: 12917 - protein, 17 aa, Artificial Sequence
  Synthetically generated peptide
  VARIANT (1)..(17): Xaa = Any Amino Acid
CCXEFACNPXXACTGXA

SEQ ID NO: 12918 - protein, 16 aa, Artificial Sequence
  Synthetically generated peptide
  VARIANT (1)..(16): Xaa = Any Amino Acid
CCXEFACNPXAXCTGA

SEQ ID NO: 12919 - protein, 17 aa, Artificial Sequence
  Synthetically generated peptide
  VARIANT (1)..(17): Xaa = Any Amino Acid
CCXEFACNPXAXXCTGA

SEQ ID NO: 12920 - protein, 17 aa, Artificial Sequence
  Synthetically generated peptide
  VARIANT (1)..(17): Xaa = Any Amino Acid
CCXEFACNPXAXCXTGA

SEQ ID NO: 12921 - protein, 17 aa, Artificial Sequence
  Synthetically generated peptide
  VARIANT (1)..(17): Xaa = Any Amino Acid
CCXEFACNPXAXCTXGA

SEQ ID NO: 12922 - protein, 17 aa, Artificial Sequence
  Synthetically generated peptide
  VARIANT (1)..(17): Xaa = Any Amino Acid
CCXEFACNPXAXCTGXA

SEQ ID NO: 12923 - protein, 16 aa, Artificial Sequence
  Synthetically generated peptide
  VARIANT (1)..(16): Xaa = Any Amino Acid
CCXEFACNPXACXTGA

SEQ ID NO: 12924 - protein, 17 aa, Artificial Sequence
  Synthetically generated peptide
  VARIANT (1)..(17): Xaa = Any Amino Acid
CCXEFACNPXACXXTGA

SEQ ID NO: 12925 - protein, 17 aa, Artificial Sequence
  Synthetically generated peptide
  VARIANT (1)..(17): Xaa = Any Amino Acid
CCXEFACNPXACXTXGA

SEQ ID NO: 12926 - protein, 17 aa, Artificial Sequence
  Synthetically generated peptide
  VARIANT (1)..(17): Xaa = Any Amino Acid
CCXEFACNPXACXTGXA

SEQ ID NO: 12927 - protein, 16 aa, Artificial Sequence
  Synthetically generated peptide
  VARIANT (1)..(16): Xaa = Any Amino Acid
CCXEFACNPXACTXGA

SEQ ID NO: 12928 - protein, 17 aa, Artificial Sequence
  Synthetically generated peptide
  VARIANT (1)..(17): Xaa = Any Amino Acid
CCXEFACNPXACTXXGA

SEQ ID NO: 12929 - protein, 17 aa, Artificial Sequence
  Synthetically generated peptide
  VARIANT (1)..(17): Xaa = Any Amino Acid
CCXEFACNPXACTXGXA

SEQ ID NO: 12930 - protein, 16 aa, Artificial Sequence
  Synthetically generated peptide
  VARIANT (1)..(16): Xaa = Any Amino Acid
CCXEFACNPXACTGXA

SEQ ID NO: 12931 - protein, 17 aa, Artificial Sequence
  Synthetically generated peptide
  VARIANT (1)..(17): Xaa = Any Amino Acid
CCXEFACNPXACTGXXA

SEQ ID NO: 12932 - protein, 15 aa, Artificial Sequence
  Synthetically generated peptide
  VARIANT (1)..(15): Xaa = Any Amino Acid
CCXEFACNPAXCTGA

SEQ ID NO: 12933 - protein, 16 aa, Artificial Sequence
  Synthetically generated peptide
  VARIANT (1)..(16): Xaa = Any Amino Acid
CCXEFACNPAXXCTGA

SEQ ID NO: 12934 - protein, 17 aa, Artificial Sequence
  Synthetically generated peptide
  VARIANT (1)..(17): Xaa = Any Amino Acid
CCXEFACNPAXXXCTGA

SEQ ID NO: 12935 - protein, 17 aa, Artificial Sequence
  Synthetically generated peptide
  VARIANT (1)..(17): Xaa = Any Amino Acid
CCXEFACNPAXXCXTGA

SEQ ID NO: 12936 - protein, 17 aa, Artificial Sequence
  Synthetically generated peptide
  VARIANT (1)..(17): Xaa = Any Amino Acid
CCXEFACNPAXXCTXGA

SEQ ID NO: 12937 - protein, 17 aa, Artificial Sequence
  Synthetically generated peptide
  VARIANT (1)..(17): Xaa = Any Amino Acid
CCXEFACNPAXXCTGXA

SEQ ID NO: 12938 - protein, 16 aa, Artificial Sequence
  Synthetically generated peptide
  VARIANT (1)..(16): Xaa = Any Amino Acid
CCXEFACNPAXCXTGA

SEQ ID NO: 12939 - protein, 17 aa, Artificial Sequence
  Synthetically generated peptide
  VARIANT (1)..(17): Xaa = Any Amino Acid
CCXEFACNPAXCXXTGA

SEQ ID NO: 12940 - protein, 17 aa, Artificial Sequence
  Synthetically generated peptide
  VARIANT (1)..(17): Xaa = Any Amino Acid
CCXEFACNPAXCXTXGA

SEQ ID NO: 12941 - protein, 17 aa, Artificial Sequence
  Synthetically generated peptide
  VARIANT (1)..(17): Xaa = Any Amino Acid
CCXEFACNPAXCXTGXA

SEQ ID NO: 12942 - protein, 16 aa, Artificial Sequence
  Synthetically generated peptide
  VARIANT (1)..(16): Xaa = Any Amino Acid
CCXEFACNPAXCTXGA

SEQ ID NO: 12943 - protein, 17 aa, Artificial Sequence
  Synthetically generated peptide
  VARIANT (1)..(17): Xaa = Any Amino Acid
CCXEFACNPAXCTXXGA

SEQ ID NO: 12944 - protein, 17 aa, Artificial Sequence
  Synthetically generated peptide
  VARIANT (1)..(17): Xaa = Any Amino Acid
CCXEFACNPAXCTXGXA

SEQ ID NO: 12945 - protein, 16 aa, Artificial Sequence
  Synthetically generated peptide
  VARIANT (1)..(16): Xaa = Any Amino Acid
CCXEFACNPAXCTGXA

SEQ ID NO: 12946 - protein, 17 aa, Artificial Sequence
  Synthetically generated peptide
  VARIANT (1)..(17): Xaa = Any Amino Acid
CCXEFACNPAXCTGXXA

SEQ ID NO: 12947 - protein, 15 aa, Artificial Sequence
  Synthetically generated peptide
  VARIANT (1)..(15): Xaa = Any Amino Acid
CCXEFACNPACXTGA

SEQ ID NO: 12948 - protein, 16 aa, Artificial Sequence
  Synthetically generated peptide
  VARIANT (1)..(16): Xaa = Any Amino Acid
CCXEFACNPACXXTGA

SEQ ID NO: 12949 - protein, 17 aa, Artificial Sequence
  Synthetically generated peptide
  VARIANT (1)..(17): Xaa = Any Amino Acid
CCXEFACNPACXXXTGA

SEQ ID NO: 12950 - protein, 17 aa, Artificial Sequence
  Synthetically generated peptide
  VARIANT (1)..(17): Xaa = Any Amino Acid
CCXEFACNPACXXTXGA

SEQ ID NO: 12951 - protein, 17 aa, Artificial Sequence
  Synthetically generated peptide
  VARIANT (1)..(17): Xaa = Any Amino Acid
CCXEFACNPACXXTGXA

SEQ ID NO: 12952 - protein, 16 aa, Artificial Sequence
  Synthetically generated peptide
  VARIANT (1)..(16): Xaa = Any Amino Acid
CCXEFACNPACXTXGA

SEQ ID NO: 12953 - protein, 17 aa, Artificial Sequence
  Synthetically generated peptide
  VARIANT (1)..(17): Xaa = Any Amino Acid
CCXEFACNPACXTXXGA

SEQ ID NO: 12954 - protein, 17 aa, Artificial Sequence
  Synthetically generated peptide
  VARIANT (1)..(17): Xaa = Any Amino Acid
CCXEFACNPACXTXGXA

SEQ ID NO: 12955 - protein, 16 aa, Artificial Sequence
  Synthetically generated peptide
  VARIANT (1)..(16): Xaa = Any Amino Acid
CCXEFACNPACXTGXA

SEQ ID NO: 12956 - protein, 17 aa, Artificial Sequence
  Synthetically generated peptide
  VARIANT (1)..(17): Xaa = Any Amino Acid
CCXEFACNPACXTGXXA

SEQ ID NO: 12957 - protein, 15 aa, Artificial Sequence
  Synthetically generated peptide
  VARIANT (1)..(15): Xaa = Any Amino Acid
CCXEFACNPACTXGA

SEQ ID NO: 12958 - protein, 16 aa, Artificial Sequence
  Synthetically generated peptide
  VARIANT (1)..(16): Xaa = Any Amino Acid
CCXEFACNPACTXXGA

SEQ ID NO: 12959 - protein, 17 aa, Artificial Sequence
  Synthetically generated peptide
  VARIANT (1)..(17): Xaa = Any Amino Acid
CCXEFACNPACTXXXGA

SEQ ID NO: 12960 - protein, 17 aa, Artificial Sequence
  Synthetically generated peptide
  VARIANT (1)..(17): Xaa = Any Amino Acid
CCXEFACNPACTXXGXA

SEQ ID NO: 12961 - protein, 16 aa, Artificial Sequence
  Synthetically generated peptide
  VARIANT (1)..(16): Xaa = Any Amino Acid
CCXEFACNPACTXGXA

SEQ ID NO: 12962 - protein, 17 aa, Artificial Sequence
  Synthetically generated peptide
  VARIANT (1)..(17): Xaa = Any Amino Acid
CCXEFACNPACTXGXXA

SEQ ID NO: 12963 - protein, 15 aa, Artificial Sequence
  Synthetically generated peptide
  VARIANT (1)..(15): Xaa = Any Amino Acid
CCXEFACNPACTGXA

SEQ ID NO: 12964 - protein, 16 aa, Artificial Sequence
  Synthetically generated peptide
  VARIANT (1)..(16): Xaa = Any Amino Acid
CCXEFACNPACTGXXA

SEQ ID NO: 12965 - protein, 17 aa, Artificial Sequence
  Synthetically generated peptide
  VARIANT (1)..(17): Xaa = Any Amino Acid
CCXEFACNPACTGXXXA

SEQ ID NO: 12966 - protein, 14 aa, Artificial Sequence
  Synthetically generated peptide
  VARIANT (1)..(14): Xaa = Any Amino Acid
CCEXFACNPACTGA

SEQ ID NO: 12967 - protein, 15 aa, Artificial Sequence
  Synthetically generated peptide
  VARIANT (1)..(15): Xaa = Any Amino Acid
CCEXXFACNPACTGA

SEQ ID NO: 12968 - protein, 16 aa, Artificial Sequence
  Synthetically generated peptide
  VARIANT (1)..(16): Xaa = Any Amino Acid
CCEXXXFACNPACTGA

SEQ ID NO: 12969 - protein, 17 aa, Artificial Sequence
  Synthetically generated peptide
  VARIANT (1)..(17): Xaa = Any Amino Acid
CCEXXXXFACNPACTGA

SEQ ID NO: 12970 - protein, 17 aa, Artificial Sequence
  Synthetically generated peptide
  VARIANT (1)..(17): Xaa = Any Amino Acid
CCEXXXFXACNPACTGA

SEQ ID NO: 12971 - protein, 17 aa, Artificial Sequence
  Synthetically generated peptide
  VARIANT (1)..(17): Xaa = Any Amino Acid
CCEXXXFACXNPACTGA

SEQ ID NO: 12972 - protein, 17 aa, Artificial Sequence
  Synthetically generated peptide
  VARIANT (1)..(17): Xaa = Any Amino Acid
CCEXXXFACNXPACTGA

SEQ ID NO: 12973 - protein, 17 aa, Artificial Sequence
  Synthetically generated peptide
  VARIANT (1)..(17): Xaa = Any Amino Acid
CCEXXXFACNPXACTGA

SEQ ID NO: 12974 - protein, 17 aa, Artificial Sequence
  Synthetically generated peptide
  VARIANT (1)..(17): Xaa = Any Amino Acid
CCEXXXFACNPAXCTGA

SEQ ID NO: 12975 - protein, 17 aa, Artificial Sequence
  Synthetically generated peptide
  VARIANT (1)..(17): Xaa = Any Amino Acid
CCEXXXFACNPACXTGA

SEQ ID NO: 12976 - protein, 17 aa, Artificial Sequence
  Synthetically generated peptide
  VARIANT (1)..(17): Xaa = Any Amino Acid
CCEXXXFACNPACTXGA

SEQ ID NO: 12977 - protein, 17 aa, Artificial Sequence
  Synthetically generated peptide
  VARIANT (1)..(17): Xaa = Any Amino Acid
CCEXXXFACNPACTGXA

SEQ ID NO: 12978 - protein, 16 aa, Artificial Sequence
  Synthetically generated peptide
  VARIANT (1)..(16): Xaa = Any Amino Acid
CCEXXFXACNPACTGA

SEQ ID NO: 12979 - protein, 17 aa, Artificial Sequence
  Synthetically generated peptide
  VARIANT (1)..(17): Xaa = Any Amino Acid
CCEXXFXXACNPACTGA

SEQ ID NO: 12980 - protein, 17 aa, Artificial Sequence
  Synthetically generated peptide
  VARIANT (1)..(17): Xaa = Any Amino Acid
CCEXXFXACXNPACTGA

SEQ ID NO: 12981 - protein, 17 aa, Artificial Sequence
  Synthetically generated peptide
  VARIANT (1)..(17): Xaa = Any Amino Acid
CCEXXFXACNXPACTGA

SEQ ID NO: 12982 - protein, 17 aa, Artificial Sequence
  Synthetically generated peptide
  VARIANT (1)..(17): Xaa = Any Amino Acid
CCEXXFXACNPXACTGA

SEQ ID NO: 12983 - protein, 17 aa, Artificial Sequence
  Synthetically generated peptide
  VARIANT (1)..(17): Xaa = Any Amino Acid
CCEXXFXACNPAXCTGA

SEQ ID NO: 12984 - protein, 17 aa, Artificial Sequence
  Synthetically generated peptide
  VARIANT (1)..(17): Xaa = Any Amino Acid
CCEXXFXACNPACXTGA

SEQ ID NO: 12985 - protein, 17 aa, Artificial Sequence
  Synthetically generated peptide
  VARIANT (1)..(17): Xaa = Any Amino Acid
CCEXXFXACNPACTXGA

SEQ ID NO: 12986 - protein, 17 aa, Artificial Sequence
  Synthetically generated peptide
  VARIANT (1)..(17): Xaa = Any Amino Acid
CCEXXFXACNPACTGXA

SEQ ID NO: 12987 - protein, 16 aa, Artificial Sequence
  Synthetically generated peptide
  VARIANT (1)..(16): Xaa = Any Amino Acid
CCEXXFACXNPACTGA

SEQ ID NO: 12988 - protein, 17 aa, Artificial Sequence
  Synthetically generated peptide
  VARIANT (1)..(17): Xaa = Any Amino Acid
CCEXXFACXXNPACTGA

SEQ ID NO: 12989 - protein, 17 aa, Artificial Sequence
  Synthetically generated peptide
  VARIANT (1)..(17): Xaa = Any Amino Acid
CCEXXFACXNXPACTGA

SEQ ID NO: 12990 - protein, 17 aa, Artificial Sequence
  Synthetically generated peptide
  VARIANT (1)..(17): Xaa = Any Amino Acid
CCEXXFACXNPXACTGA

SEQ ID NO: 12991 - protein, 17 aa, Artificial Sequence
  Synthetically generated peptide
  VARIANT (1)..(17): Xaa = Any Amino Acid
CCEXXFACXNPAXCTGA

SEQ ID NO: 12992 - protein, 17 aa, Artificial Sequence
  Synthetically generated peptide
  VARIANT (1)..(17): Xaa = Any Amino Acid
CCEXXFACXNPACXTGA

SEQ ID NO: 12993 - protein, 17 aa, Artificial Sequence
  Synthetically generated peptide
  VARIANT (1)..(17): Xaa = Any Amino Acid
CCEXXFACXNPACTXGA

SEQ ID NO: 12994 - protein, 17 aa, Artificial Sequence
  Synthetically generated peptide
  VARIANT (1)..(17): Xaa = Any Amino Acid
CCEXXFACXNPACTGXA

SEQ ID NO: 12995 - protein, 16 aa, Artificial Sequence
  Synthetically generated peptide
  VARIANT (1)..(16): Xaa = Any Amino Acid
CCEXXFACNXPACTGA

SEQ ID NO: 12996 - protein, 17 aa, Artificial Sequence
  Synthetically generated peptide
  VARIANT (1)..(17): Xaa = Any Amino Acid
CCEXXFACNXXPACTGA

SEQ ID NO: 12997 - protein, 17 aa, Artificial Sequence
  Synthetically generated peptide
  VARIANT (1)..(17): Xaa = Any Amino Acid
CCEXXFACNXPXACTGA

SEQ ID NO: 12998 - protein, 17 aa, Artificial Sequence
  Synthetically generated peptide
  VARIANT (1)..(17): Xaa = Any Amino Acid
CCEXXFACNXPAXCTGA

SEQ ID NO: 12999 - protein, 17 aa, Artificial Sequence
  Synthetically generated peptide
  VARIANT (1)..(17): Xaa = Any Amino Acid
CCEXXFACNXPACXTGA

SEQ ID NO: 13000 - protein, 17 aa, Artificial Sequence
  Synthetically generated peptide
  VARIANT (1)..(17): Xaa = Any Amino Acid
CCEXXFACNXPACTXGA

SEQ ID NO: 13001 - protein, 17 aa, Artificial Sequence
  Synthetically generated peptide
  VARIANT (1)..(17): Xaa = Any Amino Acid
CCEXXFACNXPACTGXA

SEQ ID NO: 13002 - protein, 16 aa, Artificial Sequence
  Synthetically generated peptide
  VARIANT (1)..(16): Xaa = Any Amino Acid
CCEXXFACNPXACTGA

SEQ ID NO: 13003 - protein, 17 aa, Artificial Sequence
  Synthetically generated peptide
  VARIANT (1)..(17): Xaa = Any Amino Acid
CCEXXFACNPXXACTGA

SEQ ID NO: 13004 - protein, 17 aa, Artificial Sequence
  Synthetically generated peptide
  VARIANT (1)..(17): Xaa = Any Amino Acid
CCEXXFACNPXAXCTGA

SEQ ID NO: 13005 - protein, 17 aa, Artificial Sequence
  Synthetically generated peptide
  VARIANT (1)..(17): Xaa = Any Amino Acid
CCEXXFACNPXACXTGA

SEQ ID NO: 13006 - protein, 17 aa, Artificial Sequence
  Synthetically generated peptide
  VARIANT (1)..(17): Xaa = Any Amino Acid
CCEXXFACNPXACTXGA

SEQ ID NO: 13007 - protein, 17 aa, Artificial Sequence
  Synthetically generated peptide
  VARIANT (1)..(17): Xaa = Any Amino Acid
CCEXXFACNPXACTGXA

SEQ ID NO: 13008 - protein, 16 aa, Artificial Sequence
  Synthetically generated peptide
  VARIANT (1)..(16): Xaa = Any Amino Acid
CCEXXFACNPAXCTGA

SEQ ID NO: 13009 - protein, 17 aa, Artificial Sequence
  Synthetically generated peptide
  VARIANT (1)..(17): Xaa = Any Amino Acid
CCEXXFACNPAXXCTGA

SEQ ID NO: 13010 - protein, 17 aa, Artificial Sequence
  Synthetically generated peptide
  VARIANT (1)..(17): Xaa = Any Amino Acid
CCEXXFACNPAXCXTGA

SEQ ID NO: 13011 - protein, 17 aa, Artificial Sequence
  Synthetically generated peptide
  VARIANT (1)..(17): Xaa = Any Amino Acid
CCEXXFACNPAXCTXGA

SEQ ID NO: 13012 - protein, 17 aa, Artificial Sequence
  Synthetically generated peptide
  VARIANT (1)..(17): Xaa = Any Amino Acid
CCEXXFACNPAXCTGXA

SEQ ID NO: 13013 - protein, 16 aa, Artificial Sequence
  Synthetically generated peptide
  VARIANT (1)..(16): Xaa = Any Amino Acid
CCEXXFACNPACXTGA

SEQ ID NO: 13014 - protein, 17 aa, Artificial Sequence
  Synthetically generated peptide
  VARIANT (1)..(17): Xaa = Any Amino Acid
CCEXXFACNPACXXTGA

SEQ ID NO: 13015 - protein, 17 aa, Artificial Sequence
  Synthetically generated peptide
  VARIANT (1)..(17): Xaa = Any Amino Acid
CCEXXFACNPACXTXGA

SEQ ID NO: 13016 - protein, 17 aa, Artificial Sequence
  Synthetically generated peptide
  VARIANT (1)..(17): Xaa = Any Amino Acid
CCEXXFACNPACXTGXA

SEQ ID NO: 13017 - protein, 16 aa, Artificial Sequence
  Synthetically generated peptide
  VARIANT (1)..(16): Xaa = Any Amino Acid
CCEXXFACNPACTXGA

SEQ ID NO: 13018 - protein, 17 aa, Artificial Sequence
  Synthetically generated peptide
  VARIANT (1)..(17): Xaa = Any Amino Acid
CCEXXFACNPACTXXGA

SEQ ID NO: 13019 - protein, 17 aa, Artificial Sequence
  Synthetically generated peptide
  VARIANT (1)..(17): Xaa = Any Amino Acid
CCEXXFACNPACTXGXA

SEQ ID NO: 13020 - protein, 16 aa, Artificial Sequence
  Synthetically generated peptide
  VARIANT (1)..(16): Xaa = Any Amino Acid
CCEXXFACNPACTGXA

SEQ ID NO: 13021 - protein, 17 aa, Artificial Sequence
  Synthetically generated peptide
  VARIANT (1)..(17): Xaa = Any Amino Acid
CCEXXFACNPACTGXXA

SEQ ID NO: 13022 - protein, 15 aa, Artificial Sequence
  Synthetically generated peptide
  VARIANT (1)..(15): Xaa = Any Amino Acid
CCEXFXACNPACTGA

SEQ ID NO: 13023 - protein, 16 aa, Artificial Sequence
  Synthetically generated peptide
  VARIANT (1)..(16): Xaa = Any Amino Acid
CCEXFXXACNPACTGA

SEQ ID NO: 13024 - protein, 17 aa, Artificial Sequence
  Synthetically generated peptide
  VARIANT (1)..(17): Xaa = Any Amino Acid
CCEXFXXXACNPACTGA

SEQ ID NO: 13025 - protein, 17 aa, Artificial Sequence
  Synthetically generated peptide
  VARIANT (1)..(17): Xaa = Any Amino Acid
CCEXFXXACXNPACTGA

SEQ ID NO: 13026 - protein, 17 aa, Artificial Sequence
  Synthetically generated peptide
  VARIANT (1)..(17): Xaa = Any Amino Acid
CCEXFXXACNXPACTGA

SEQ ID NO: 13027 - protein, 17 aa, Artificial Sequence
  Synthetically generated peptide
  VARIANT (1)..(17): Xaa = Any Amino Acid
CCEXFXXACNPXACTGA

SEQ ID NO: 13028 - protein, 17 aa, Artificial Sequence
  Synthetically generated peptide
  VARIANT (1)..(17): Xaa = Any Amino Acid
CCEXFXXACNPAXCTGA

SEQ ID NO: 13029 - protein, 17 aa, Artificial Sequence
  Synthetically generated peptide
  VARIANT (1)..(17): Xaa = Any Amino Acid
CCEXFXXACNPACXTGA

SEQ ID NO: 13030 - protein, 17 aa, Artificial Sequence
  Synthetically generated peptide
  VARIANT (1)..(17): Xaa = Any Amino Acid
CCEXFXXACNPACTXGA

SEQ ID NO: 13031 - protein, 17 aa, Artificial Sequence
  Synthetically generated peptide
  VARIANT (1)..(17): Xaa = Any Amino Acid
CCEXFXXACNPACTGXA

SEQ ID NO: 13032 - protein, 16 aa, Artificial Sequence
  Synthetically generated peptide
  VARIANT (1)..(16): Xaa = Any Amino Acid
CCEXFXACXNPACTGA

SEQ ID NO: 13033 - protein, 17 aa, Artificial Sequence
  Synthetically generated peptide
  VARIANT (1)..(17): Xaa = Any Amino Acid
CCEXFXACXXNPACTGA

SEQ ID NO: 13034 - protein, 17 aa, Artificial Sequence
  Synthetically generated peptide
  VARIANT (1)..(17): Xaa = Any Amino Acid
CCEXFXACXNXPACTGA

SEQ ID NO: 13035 - protein, 17 aa, Artificial Sequence
  Synthetically generated peptide
  VARIANT (1)..(17): Xaa = Any Amino Acid
CCEXFXACXNPXACTGA

SEQ ID NO: 13036 - protein, 17 aa, Artificial Sequence
  Synthetically generated peptide
  VARIANT (1)..(17): Xaa = Any Amino Acid
CCEXFXACXNPAXCTGA

SEQ ID NO: 13037 - protein, 17 aa, Artificial Sequence
  Synthetically generated peptide
  VARIANT (1)..(17): Xaa = Any Amino Acid
CCEXFXACXNPACXTGA

SEQ ID NO: 13038 - protein, 17 aa, Artificial Sequence
  Synthetically generated peptide
  VARIANT (1)..(17): Xaa = Any Amino Acid
CCEXFXACXNPACTXGA

SEQ ID NO: 13039 - protein, 17 aa, Artificial Sequence
  Synthetically generated peptide
  VARIANT (1)..(17): Xaa = Any Amino Acid
CCEXFXACXNPACTGXA

SEQ ID NO: 13040 - protein, 16 aa, Artificial Sequence
  Synthetically generated peptide
  VARIANT (1)..(16): Xaa = Any Amino Acid
CCEXFXACNXPACTGA

SEQ ID NO: 13041 - protein, 17 aa, Artificial Sequence
  Synthetically generated peptide
  VARIANT (1)..(17): Xaa = Any Amino Acid
CCEXFXACNXXPACTGA

SEQ ID NO: 13042 - protein, 17 aa, Artificial Sequence
  Synthetically generated peptide
  VARIANT (1)..(17): Xaa = Any Amino Acid
CCEXFXACNXPXACTGA

SEQ ID NO: 13043 - protein, 17 aa, Artificial Sequence
  Synthetically generated peptide
  VARIANT (1)..(17): Xaa = Any Amino Acid
CCEXFXACNXPAXCTGA

SEQ ID NO: 13044 - protein, 17 aa, Artificial Sequence
  Synthetically generated peptide
  VARIANT (1)..(17): Xaa = Any Amino Acid
CCEXFXACNXPACXTGA

SEQ ID NO: 13045 - protein, 17 aa, Artificial Sequence
  Synthetically generated peptide
  VARIANT (1)..(17): Xaa = Any Amino Acid
CCEXFXACNXPACTXGA

SEQ ID NO: 13046 - protein, 17 aa, Artificial Sequence
  Synthetically generated peptide
  VARIANT (1)..(17): Xaa = Any Amino Acid
CCEXFXACNXPACTGXA

SEQ ID NO: 13047 - protein, 16 aa, Artificial Sequence
  Synthetically generated peptide
  VARIANT (1)..(16): Xaa = Any Amino Acid
CCEXFXACNPXACTGA

SEQ ID NO: 13048 - protein, 17 aa, Artificial Sequence
  Synthetically generated peptide
  VARIANT (1)..(17): Xaa = Any Amino Acid
CCEXFXACNPXXACTGA

SEQ ID NO: 13049 - protein, 17 aa, Artificial Sequence
  Synthetically generated peptide
  VARIANT (1)..(17): Xaa = Any Amino Acid
CCEXFXACNPXAXCTGA

SEQ ID NO: 13050 - protein, 17 aa, Artificial Sequence
  Synthetically generated peptide
  VARIANT (1)..(17): Xaa = Any Amino Acid
CCEXFXACNPXACXTGA

SEQ ID NO: 13051 - protein, 17 aa, Artificial Sequence
  Synthetically generated peptide
  VARIANT (1)..(17): Xaa = Any Amino Acid
CCEXFXACNPXACTXGA

SEQ ID NO: 13052 - protein, 17 aa, Artificial Sequence
  Synthetically generated peptide
  VARIANT (1)..(17): Xaa = Any Amino Acid
CCEXFXACNPXACTGXA

SEQ ID NO: 13053 - protein, 16 aa, Artificial Sequence
  Synthetically generated peptide
  VARIANT (1)..(16): Xaa = Any Amino Acid
CCEXFXACNPAXCTGA

SEQ ID NO: 13054 - protein, 17 aa, Artificial Sequence
  Synthetically generated peptide
  VARIANT (1)..(17): Xaa = Any Amino Acid
CCEXFXACNPAXXCTGA

SEQ ID NO: 13055 - protein, 17 aa, Artificial Sequence
  Synthetically generated peptide
  VARIANT (1)..(17): Xaa = Any Amino Acid
CCEXFXACNPAXCXTGA

SEQ ID NO: 13056 - protein, 17 aa, Artificial Sequence
  Synthetically generated peptide
  VARIANT (1)..(17): Xaa = Any Amino Acid
CCEXFXACNPAXCTXGA

SEQ ID NO: 13057 - protein, 17 aa, Artificial Sequence
  Synthetically generated peptide
  VARIANT (1)..(17): Xaa = Any Amino Acid
CCEXFXACNPAXCTGXA

SEQ ID NO: 13058 - protein, 16 aa, Artificial Sequence
  Synthetically generated peptide
  VARIANT (1)..(16): Xaa = Any Amino Acid
CCEXFXACNPACXTGA

SEQ ID NO: 13059 - protein, 17 aa, Artificial Sequence
  Synthetically generated peptide
  VARIANT (1)..(17): Xaa = Any Amino Acid
CCEXFXACNPACXXTGA

SEQ ID NO: 13060 - protein, 17 aa, Artificial Sequence
  Synthetically generated peptide
  VARIANT (1)..(17): Xaa = Any Amino Acid
CCEXFXACNPACXTXGA

SEQ ID NO: 13061 - protein, 17 aa, Artificial Sequence
  Synthetically generated peptide
  VARIANT (1)..(17): Xaa = Any Amino Acid
CCEXFXACNPACXTGXA

SEQ ID NO: 13062 - protein, 16 aa, Artificial Sequence
  Synthetically generated peptide
  VARIANT (1)..(16): Xaa = Any Amino Acid
CCEXFXACNPACTXGA

SEQ ID NO: 13063 - protein, 17 aa, Artificial Sequence
  Synthetically generated peptide
  VARIANT (1)..(17): Xaa = Any Amino Acid
CCEXFXACNPACTXXGA

SEQ ID NO: 13064 - protein, 17 aa, Artificial Sequence
  Synthetically generated peptide
  VARIANT (1)..(17): Xaa = Any Amino Acid
CCEXFXACNPACTXGXA

SEQ ID NO: 13065 - protein, 16 aa, Artificial Sequence
  Synthetically generated peptide
  VARIANT (1)..(16): Xaa = Any Amino Acid
CCEXFXACNPACTGXA

SEQ ID NO: 13066 - protein, 17 aa, Artificial Sequence
  Synthetically generated peptide
  VARIANT (1)..(17): Xaa = Any Amino Acid
CCEXFXACNPACTGXXA

SEQ ID NO: 13067 - protein, 15 aa, Artificial Sequence
  Synthetically generated peptide
  VARIANT (1)..(15): Xaa = Any Amino Acid
CCEXFACXNPACTGA

SEQ ID NO: 13068 - protein, 16 aa, Artificial Sequence
  Synthetically generated peptide
  VARIANT (1)..(16): Xaa = Any Amino Acid
CCEXFACXXNPACTGA

SEQ ID NO: 13069 - protein, 17 aa, Artificial Sequence
  Synthetically generated peptide
  VARIANT (1)..(17): Xaa = Any Amino Acid
CCEXFACXXXNPACTGA

SEQ ID NO: 13070 - protein, 17 aa, Artificial Sequence
  Synthetically generated peptide
  VARIANT (1)..(17): Xaa = Any Amino Acid
CCEXFACXXNXPACTGA

SEQ ID NO: 13071 - protein, 17 aa, Artificial Sequence
  Synthetically generated peptide
  VARIANT (1)..(17): Xaa = Any Amino Acid
CCEXFACXXNPXACTGA

SEQ ID NO: 13072 - protein, 17 aa, Artificial Sequence
  Synthetically generated peptide
  VARIANT (1)..(17): Xaa = Any Amino Acid
CCEXFACXXNPAXCTGA

SEQ ID NO: 13073 - protein, 17 aa, Artificial Sequence
  Synthetically generated peptide
  VARIANT (1)..(17): Xaa = Any Amino Acid
CCEXFACXXNPACXTGA

SEQ ID NO: 13074 - protein, 17 aa, Artificial Sequence
  Synthetically generated peptide
  VARIANT (1)..(17): Xaa = Any Amino Acid
CCEXFACXXNPACTXGA

SEQ ID NO: 13075 - protein, 17 aa, Artificial Sequence
  Synthetically generated peptide
  VARIANT (1)..(17): Xaa = Any Amino Acid
CCEXFACXXNPACTGXA

SEQ ID NO: 13076 - protein, 16 aa, Artificial Sequence
  Synthetically generated peptide
  VARIANT (1)..(16): Xaa = Any Amino Acid
CCEXFACXNXPACTGA

SEQ ID NO: 13077 - protein, 17 aa, Artificial Sequence
  Synthetically generated peptide
  VARIANT (1)..(17): Xaa = Any Amino Acid
CCEXFACXNXXPACTGA

SEQ ID NO: 13078 - protein, 17 aa, Artificial Sequence
  Synthetically generated peptide
  VARIANT (1)..(17): Xaa = Any Amino Acid
CCEXFACXNXPXACTGA

SEQ ID NO: 13079 - protein, 17 aa, Artificial Sequence
  Synthetically generated peptide
  VARIANT (1)..(17): Xaa = Any Amino Acid
CCEXFACXNXPAXCTGA

SEQ ID NO: 13080 - protein, 17 aa, Artificial Sequence
  Synthetically generated peptide
  VARIANT (1)..(17): Xaa = Any Amino Acid
CCEXFACXNXPACXTGA

SEQ ID NO: 13081 - protein, 17 aa, Artificial Sequence
  Synthetically generated peptide
  VARIANT (1)..(17): Xaa = Any Amino Acid
CCEXFACXNXPACTXGA

SEQ ID NO: 13082 - protein, 17 aa, Artificial Sequence
  Synthetically generated peptide
  VARIANT (1)..(17): Xaa = Any Amino Acid
CCEXFACXNXPACTGXA

SEQ ID NO: 13083 - protein, 16 aa, Artificial Sequence
  Synthetically generated peptide
  VARIANT (1)..(16): Xaa = Any Amino Acid
CCEXFACXNPXACTGA

SEQ ID NO: 13084 - protein, 17 aa, Artificial Sequence
  Synthetically generated peptide
  VARIANT (1)..(17): Xaa = Any Amino Acid
CCEXFACXNPXXACTGA

SEQ ID NO: 13085 - protein, 17 aa, Artificial Sequence
  Synthetically generated peptide
  VARIANT (1)..(17): Xaa = Any Amino Acid
CCEXFACXNPXAXCTGA

SEQ ID NO: 13086 - protein, 17 aa, Artificial Sequence
  Synthetically generated peptide
  VARIANT (1)..(17): Xaa = Any Amino Acid
CCEXFACXNPXACXTGA

SEQ ID NO: 13087 - protein, 17 aa, Artificial Sequence
  Synthetically generated peptide
  VARIANT (1)..(17): Xaa = Any Amino Acid
CCEXFACXNPXACTXGA

SEQ ID NO: 13088 - protein, 17 aa, Artificial Sequence
  Synthetically generated peptide
  VARIANT (1)..(17): Xaa = Any Amino Acid
CCEXFACXNPXACTGXA

SEQ ID NO: 13089 - protein, 16 aa, Artificial Sequence
  Synthetically generated peptide
  VARIANT (1)..(16): Xaa = Any Amino Acid
CCEXFACXNPAXCTGA

SEQ ID NO: 13090 - protein, 17 aa, Artificial Sequence
  Synthetically generated peptide
  VARIANT (1)..(17): Xaa = Any Amino Acid
CCEXFACXNPAXXCTGA

SEQ ID NO: 13091 - protein, 17 aa, Artificial Sequence
  Synthetically generated peptide
  VARIANT (1)..(17): Xaa = Any Amino Acid
CCEXFACXNPAXCXTGA

SEQ ID NO: 13092 - protein, 17 aa, Artificial Sequence
  Synthetically generated peptide
  VARIANT (1)..(17): Xaa = Any Amino Acid
CCEXFACXNPAXCTXGA

SEQ ID NO: 13093 - protein, 17 aa, Artificial Sequence
  Synthetically generated peptide
  VARIANT (1)..(17): Xaa = Any Amino Acid
CCEXFACXNPAXCTGXA

SEQ ID NO: 13094 - protein, 16 aa, Artificial Sequence
  Synthetically generated peptide
  VARIANT (1)..(16): Xaa = Any Amino Acid
CCEXFACXNPACXTGA

SEQ ID NO: 13095 - protein, 17 aa, Artificial Sequence
  Synthetically generated peptide
  VARIANT (1)..(17): Xaa = Any Amino Acid
CCEXFACXNPACXXTGA

SEQ ID NO: 13096 - protein, 17 aa, Artificial Sequence
  Synthetically generated peptide
  VARIANT (1)..(17): Xaa = Any Amino Acid
CCEXFACXNPACXTXGA

SEQ ID NO: 13097 - protein, 17 aa, Artificial Sequence
  Synthetically generated peptide
  VARIANT (1)..(17): Xaa = Any Amino Acid
CCEXFACXNPACXTGXA

SEQ ID NO: 13098 - protein, 16 aa, Artificial Sequence
  Synthetically generated peptide
  VARIANT (1)..(16): Xaa = Any Amino Acid
CCEXFACXNPACTXGA

SEQ ID NO: 13099 - protein, 17 aa, Artificial Sequence
  Synthetically generated peptide
  VARIANT (1)..(17): Xaa = Any Amino Acid
CCEXFACXNPACTXXGA

SEQ ID NO: 13100 - protein, 17 aa, Artificial Sequence
  Synthetically generated peptide
  VARIANT (1)..(17): Xaa = Any Amino Acid
CCEXFACXNPACTXGXA

SEQ ID NO: 13101 - protein, 16 aa, Artificial Sequence
  Synthetically generated peptide
  VARIANT (1)..(16): Xaa = Any Amino Acid
CCEXFACXNPACTGXA

SEQ ID NO: 13102 - protein, 17 aa, Artificial Sequence
  Synthetically generated peptide
  VARIANT (1)..(17): Xaa = Any Amino Acid
CCEXFACXNPACTGXXA

SEQ ID NO: 13103 - protein, 15 aa, Artificial Sequence
  Synthetically generated peptide
  VARIANT (1)..(15): Xaa = Any Amino Acid
CCEXFACNXPACTGA

SEQ ID NO: 13104 - protein, 16 aa, Artificial Sequence
  Synthetically generated peptide
  VARIANT (1)..(16): Xaa = Any Amino Acid
CCEXFACNXXPACTGA

SEQ ID NO: 13105 - protein, 17 aa, Artificial Sequence
  Synthetically generated peptide
  VARIANT (1)..(17): Xaa = Any Amino Acid
CCEXFACNXXXPACTGA

SEQ ID NO: 13106 - protein, 17 aa, Artificial Sequence
  Synthetically generated peptide
  VARIANT (1)..(17): Xaa = Any Amino Acid
CCEXFACNXXPXACTGA

SEQ ID NO: 13107 - protein, 17 aa, Artificial Sequence
  Synthetically generated peptide
  VARIANT (1)..(17): Xaa = Any Amino Acid
CCEXFACNXXPAXCTGA

SEQ ID NO: 13108 - protein, 17 aa, Artificial Sequence
  Synthetically generated peptide
  VARIANT (1)..(17): Xaa = Any Amino Acid
CCEXFACNXXPACXTGA

SEQ ID NO: 13109 - protein, 17 aa, Artificial Sequence
  Synthetically generated peptide
  VARIANT (1)..(17): Xaa = Any Amino Acid
CCEXFACNXXPACTXGA

SEQ ID NO: 13110 - protein, 17 aa, Artificial Sequence
  Synthetically generated peptide
  VARIANT (1)..(17): Xaa = Any Amino Acid
CCEXFACNXXPACTGXA

SEQ ID NO: 13111 - protein, 16 aa, Artificial Sequence
  Synthetically generated peptide
  VARIANT (1)..(16): Xaa = Any Amino Acid
CCEXFACNXPXACTGA

SEQ ID NO: 13112 - protein, 17 aa, Artificial Sequence
  Synthetically generated peptide
  VARIANT (1)..(17): Xaa = Any Amino Acid
CCEXFACNXPXXACTGA

SEQ ID NO: 13113 - protein, 17 aa, Artificial Sequence
  Synthetically generated peptide
  VARIANT (1)..(17): Xaa = Any Amino Acid
CCEXFACNXPXAXCTGA

SEQ ID NO: 13114 - protein, 17 aa, Artificial Sequence
  Synthetically generated peptide
  VARIANT (1)..(17): Xaa = Any Amino Acid
CCEXFACNXPXACXTGA

SEQ ID NO: 13115 - protein, 17 aa, Artificial Sequence
  Synthetically generated peptide
  VARIANT (1)..(17): Xaa = Any Amino Acid
CCEXFACNXPXACTXGA

SEQ ID NO: 13116 - protein, 17 aa, Artificial Sequence
  Synthetically generated peptide
  VARIANT (1)..(17): Xaa = Any Amino Acid
CCEXFACNXPXACTGXA

SEQ ID NO: 13117 - protein, 16 aa, Artificial Sequence
  Synthetically generated peptide
  VARIANT (1)..(16): Xaa = Any Amino Acid
CCEXFACNXPAXCTGA

SEQ ID NO: 13118 - protein, 17 aa, Artificial Sequence
  Synthetically generated peptide
  VARIANT (1)..(17): Xaa = Any Amino Acid
CCEXFACNXPAXXCTGA

SEQ ID NO: 13119 - protein, 17 aa, Artificial Sequence
  Synthetically generated peptide
  VARIANT (1)..(17): Xaa = Any Amino Acid
CCEXFACNXPAXCXTGA

SEQ ID NO: 13120 - protein, 17 aa, Artificial Sequence
  Synthetically generated peptide
  VARIANT (1)..(17): Xaa = Any Amino Acid
CCEXFACNXPAXCTXGA

SEQ ID NO: 13121 - protein, 17 aa, Artificial Sequence
  Synthetically generated peptide
  VARIANT (1)..(17): Xaa = Any Amino Acid
CCEXFACNXPAXCTGXA

SEQ ID NO: 13122 - protein, 16 aa, Artificial Sequence
  Synthetically generated peptide
  VARIANT (1)..(16): Xaa = Any Amino Acid
CCEXFACNXPACXTGA

SEQ ID NO: 13123 - protein, 17 aa, Artificial Sequence
  Synthetically generated peptide
  VARIANT (1)..(17): Xaa = Any Amino Acid
CCEXFACNXPACXXTGA

SEQ ID NO: 13124 - protein, 17 aa, Artificial Sequence
  Synthetically generated peptide
  VARIANT (1)..(17): Xaa = Any Amino Acid
CCEXFACNXPACXTXGA

SEQ ID NO: 13125 - protein, 17 aa, Artificial Sequence
  Synthetically generated peptide
  VARIANT (1)..(17): Xaa = Any Amino Acid
CCEXFACNXPACXTGXA

SEQ ID NO: 13126 - protein, 16 aa, Artificial Sequence
  Synthetically generated peptide
  VARIANT (1)..(16): Xaa = Any Amino Acid
CCEXFACNXPACTXGA

SEQ ID NO: 13127 - protein, 17 aa, Artificial Sequence
  Synthetically generated peptide
  VARIANT (1)..(17): Xaa = Any Amino Acid
CCEXFACNXPACTXXGA

SEQ ID NO: 13128 - protein, 17 aa, Artificial Sequence
  Synthetically generated peptide
  VARIANT (1)..(17): Xaa = Any Amino Acid
CCEXFACNXPACTXGXA

SEQ ID NO: 13129 - protein, 16 aa, Artificial Sequence
  Synthetically generated peptide
  VARIANT (1)..(16): Xaa = Any Amino Acid
CCEXFACNXPACTGXA

SEQ ID NO: 13130 - protein, 17 aa, Artificial Sequence
  Synthetically generated peptide
  VARIANT (1)..(17): Xaa = Any Amino Acid
CCEXFACNXPACTGXXA

SEQ ID NO: 13131 - protein, 15 aa, Artificial Sequence
  Synthetically generated peptide
  VARIANT (1)..(15): Xaa = Any Amino Acid
CCEXFACNPXACTGA

SEQ ID NO: 13132 - protein, 16 aa, Artificial Sequence
  Synthetically generated peptide
  VARIANT (1)..(16): Xaa = Any Amino Acid
CCEXFACNPXXACTGA

SEQ ID NO: 13133 - protein, 17 aa, Artificial Sequence
  Synthetically generated peptide
  VARIANT (1)..(17): Xaa = Any Amino Acid
CCEXFACNPXXXACTGA

SEQ ID NO: 13134 - protein, 17 aa, Artificial Sequence
  Synthetically generated peptide
  VARIANT (1)..(17): Xaa = Any Amino Acid
CCEXFACNPXXAXCTGA

SEQ ID NO: 13135 - protein, 17 aa, Artificial Sequence
  Synthetically generated peptide
  VARIANT (1)..(17): Xaa = Any Amino Acid
CCEXFACNPXXACXTGA

SEQ ID NO: 13136 - protein, 17 aa, Artificial Sequence
  Synthetically generated peptide
  VARIANT (1)..(17): Xaa = Any Amino Acid
CCEXFACNPXXACTXGA

SEQ ID NO: 13137 - protein, 17 aa, Artificial Sequence
  Synthetically generated peptide
  VARIANT (1)..(17): Xaa = Any Amino Acid
CCEXFACNPXXACTGXA

SEQ ID NO: 13138 - protein, 16 aa, Artificial Sequence
  Synthetically generated peptide
  VARIANT (1)..(16): Xaa = Any Amino Acid
CCEXFACNPXAXCTGA

SEQ ID NO: 13139 - protein, 17 aa, Artificial Sequence
  Synthetically generated peptide
  VARIANT (1)..(17): Xaa = Any Amino Acid
CCEXFACNPXAXXCTGA

SEQ ID NO: 13140 - protein, 17 aa, Artificial Sequence
  Synthetically generated peptide
  VARIANT (1)..(17): Xaa = Any Amino Acid
CCEXFACNPXAXCXTGA

SEQ ID NO: 13141 - protein, 17 aa, Artificial Sequence
  Synthetically generated peptide
  VARIANT (1)..(17): Xaa = Any Amino Acid
CCEXFACNPXAXCTXGA

SEQ ID NO: 13142 - protein, 17 aa, Artificial Sequence
  Synthetically generated peptide
  VARIANT (1)..(17): Xaa = Any Amino Acid
CCEXFACNPXAXCTGXA

SEQ ID NO: 13143 - protein, 16 aa, Artificial Sequence
  Synthetically generated peptide
  VARIANT (1)..(16): Xaa = Any Amino Acid
CCEXFACNPXACXTGA

SEQ ID NO: 13144 - protein, 17 aa, Artificial Sequence
  Synthetically generated peptide
  VARIANT (1)..(17): Xaa = Any Amino Acid
CCEXFACNPXACXXTGA

SEQ ID NO: 13145 - protein, 17 aa, Artificial Sequence
  Synthetically generated peptide
  VARIANT (1)..(17): Xaa = Any Amino Acid
CCEXFACNPXACXTXGA

SEQ ID NO: 13146 - protein, 17 aa, Artificial Sequence
  Synthetically generated peptide
  VARIANT (1)..(17): Xaa = Any Amino Acid
CCEXFACNPXACXTGXA

SEQ ID NO: 13147 - protein, 16 aa, Artificial Sequence
  Synthetically generated peptide
  VARIANT (1)..(16): Xaa = Any Amino Acid
CCEXFACNPXACTXGA

SEQ ID NO: 13148 - protein, 17 aa, Artificial Sequence
  Synthetically generated peptide
  VARIANT (1)..(17): Xaa = Any Amino Acid
CCEXFACNPXACTXXGA

SEQ ID NO: 13149 - protein, 17 aa, Artificial Sequence
  Synthetically generated peptide
  VARIANT (1)..(17): Xaa = Any Amino Acid
CCEXFACNPXACTXGXA

SEQ ID NO: 13150 - protein, 16 aa, Artificial Sequence
  Synthetically generated peptide
  VARIANT (1)..(16): Xaa = Any Amino Acid
CCEXFACNPXACTGXA

SEQ ID NO: 13151 - protein, 17 aa, Artificial Sequence
  Synthetically generated peptide
  VARIANT (1)..(17): Xaa = Any Amino Acid
CCEXFACNPXACTGXXA

SEQ ID NO: 13152 - protein, 15 aa, Artificial Sequence
  Synthetically generated peptide
  VARIANT (1)..(15): Xaa = Any Amino Acid
CCEXFACNPAXCTGA

SEQ ID NO: 13153 - protein, 16 aa, Artificial Sequence
  Synthetically generated peptide
  VARIANT (1)..(16): Xaa = Any Amino Acid
CCEXFACNPAXXCTGA

SEQ ID NO: 13154 - protein, 17 aa, Artificial Sequence
  Synthetically generated peptide
  VARIANT (1)..(17): Xaa = Any Amino Acid
CCEXFACNPAXXXCTGA

SEQ ID NO: 13155 - protein, 17 aa, Artificial Sequence
  Synthetically generated peptide
  VARIANT (1)..(17): Xaa = Any Amino Acid
CCEXFACNPAXXCXTGA

SEQ ID NO: 13156 - protein, 17 aa, Artificial Sequence
  Synthetically generated peptide
  VARIANT (1)..(17): Xaa = Any Amino Acid
CCEXFACNPAXXCTXGA

SEQ ID NO: 13157 - protein, 17 aa, Artificial Sequence
  Synthetically generated peptide
  VARIANT (1)..(17): Xaa = Any Amino Acid
CCEXFACNPAXXCTGXA

SEQ ID NO: 13158 - protein, 16 aa, Artificial Sequence
  Synthetically generated peptide
  VARIANT (1)..(16): Xaa = Any Amino Acid
CCEXFACNPAXCXTGA

SEQ ID NO: 13159 - protein, 17 aa, Artificial Sequence
  Synthetically generated peptide
  VARIANT (1)..(17): Xaa = Any Amino Acid
CCEXFACNPAXCXXTGA

SEQ ID NO: 13160 - protein, 17 aa, Artificial Sequence
  Synthetically generated peptide
  VARIANT (1)..(17): Xaa = Any Amino Acid
CCEXFACNPAXCXTXGA

SEQ ID NO: 13161 - protein, 17 aa, Artificial Sequence
  Synthetically generated peptide
  VARIANT (1)..(17): Xaa = Any Amino Acid
CCEXFACNPAXCXTGXA

SEQ ID NO: 13162 - protein, 16 aa, Artificial Sequence
  Synthetically generated peptide
  VARIANT (1)..(16): Xaa = Any Amino Acid
CCEXFACNPAXCTXGA

SEQ ID NO: 13163 - protein, 17 aa, Artificial Sequence
  Synthetically generated peptide
  VARIANT (1)..(17): Xaa = Any Amino Acid
CCEXFACNPAXCTXXGA

SEQ ID NO: 13164 - protein, 17 aa, Artificial Sequence
  Synthetically generated peptide
  VARIANT (1)..(17): Xaa = Any Amino Acid
CCEXFACNPAXCTXGXA

SEQ ID NO: 13165 - protein, 16 aa, Artificial Sequence
  Synthetically generated peptide
  VARIANT (1)..(16): Xaa = Any Amino Acid
CCEXFACNPAXCTGXA

SEQ ID NO: 13166 - protein, 17 aa, Artificial Sequence
  Synthetically generated peptide
  VARIANT (1)..(17): Xaa = Any Amino Acid
CCEXFACNPAXCTGXXA

SEQ ID NO: 13167 - protein, 15 aa, Artificial Sequence
  Synthetically generated peptide
  VARIANT (1)..(15): Xaa = Any Amino Acid
CCEXFACNPACXTGA

SEQ ID NO: 13168 - protein, 16 aa, Artificial Sequence
  Synthetically generated peptide
  VARIANT (1)..(16): Xaa = Any Amino Acid
CCEXFACNPACXXTGA

SEQ ID NO: 13169 - protein, 17 aa, Artificial Sequence
  Synthetically generated peptide
  VARIANT (1)..(17): Xaa = Any Amino Acid
CCEXFACNPACXXXTGA

SEQ ID NO: 13170 - protein, 17 aa, Artificial Sequence
  Synthetically generated peptide
  VARIANT (1)..(17): Xaa = Any Amino Acid
CCEXFACNPACXXTXGA

SEQ ID NO: 13171 - protein, 17 aa, Artificial Sequence
  Synthetically generated peptide
  VARIANT (1)..(17): Xaa = Any Amino Acid
CCEXFACNPACXXTGXA

SEQ ID NO: 13172 - protein, 16 aa, Artificial Sequence
  Synthetically generated peptide
  VARIANT (1)..(16): Xaa = Any Amino Acid
CCEXFACNPACXTXGA

SEQ ID NO: 13173 - protein, 17 aa, Artificial Sequence
  Synthetically generated peptide
  VARIANT (1)..(17): Xaa = Any Amino Acid
CCEXFACNPACXTXXGA

SEQ ID NO: 13174 - protein, 17 aa, Artificial Sequence
  Synthetically generated peptide
  VARIANT (1)..(17): Xaa = Any Amino Acid
CCEXFACNPACXTXGXA

SEQ ID NO: 13175 - protein, 16 aa, Artificial Sequence
  Synthetically generated peptide
  VARIANT (1)..(16): Xaa = Any Amino Acid
CCEXFACNPACXTGXA

SEQ ID NO: 13176 - protein, 17 aa, Artificial Sequence
  Synthetically generated peptide
  VARIANT (1)..(17): Xaa = Any Amino Acid
CCEXFACNPACXTGXXA

SEQ ID NO: 13177 - protein, 15 aa, Artificial Sequence
  Synthetically generated peptide
  VARIANT (1)..(15): Xaa = Any Amino Acid
CCEXFACNPACTXGA

SEQ ID NO: 13178 - protein, 16 aa, Artificial Sequence
  Synthetically generated peptide
  VARIANT (1)..(16): Xaa = Any Amino Acid
CCEXFACNPACTXXGA

SEQ ID NO: 13179 - protein, 17 aa, Artificial Sequence
  Synthetically generated peptide
  VARIANT (1)..(17): Xaa = Any Amino Acid
CCEXFACNPACTXXXGA

SEQ ID NO: 13180 - protein, 17 aa, Artificial Sequence
  Synthetically generated peptide
  VARIANT (1)..(17): Xaa = Any Amino Acid
CCEXFACNPACTXXGXA

SEQ ID NO: 13181 - protein, 16 aa, Artificial Sequence
  Synthetically generated peptide
  VARIANT (1)..(16): Xaa = Any Amino Acid
CCEXFACNPACTXGXA

SEQ ID NO: 13182 - protein, 17 aa, Artificial Sequence
  Synthetically generated peptide
  VARIANT (1)..(17): Xaa = Any Amino Acid
CCEXFACNPACTXGXXA

SEQ ID NO: 13183 - protein, 15 aa, Artificial Sequence
  Synthetically generated peptide
  VARIANT (1)..(15): Xaa = Any Amino Acid
CCEXFACNPACTGXA

SEQ ID NO: 13184 - protein, 16 aa, Artificial Sequence
  Synthetically generated peptide
  VARIANT (1)..(16): Xaa = Any Amino Acid
CCEXFACNPACTGXXA

SEQ ID NO: 13185 - protein, 17 aa, Artificial Sequence
  Synthetically generated peptide
  VARIANT (1)..(17): Xaa = Any Amino Acid
CCEXFACNPACTGXXXA

SEQ ID NO: 13186 - protein, 14 aa, Artificial Sequence
  Synthetically generated peptide
  VARIANT (1)..(14): Xaa = Any Amino Acid
CCEFXACNPACTGA

SEQ ID NO: 13187 - protein, 15 aa, Artificial Sequence
  Synthetically generated peptide
  VARIANT (1)..(15): Xaa = Any Amino Acid
CCEFXXACNPACTGA

SEQ ID NO: 13188 - protein, 16 aa, Artificial Sequence
  Synthetically generated peptide
  VARIANT (1)..(16): Xaa = Any Amino Acid
CCEFXXXACNPACTGA

SEQ ID NO: 13189 - protein, 17 aa, Artificial Sequence
  Synthetically generated peptide
  VARIANT (1)..(17): Xaa = Any Amino Acid
CCEFXXXXACNPACTGA

SEQ ID NO: 13190 - protein, 17 aa, Artificial Sequence
  Synthetically generated peptide
  VARIANT (1)..(17): Xaa = Any Amino Acid
CCEFXXXACXNPACTGA

SEQ ID NO: 13191 - protein, 17 aa, Artificial Sequence
  Synthetically generated peptide
  VARIANT (1)..(17): Xaa = Any Amino Acid
CCEFXXXACNXPACTGA

SEQ ID NO: 13192 - protein, 17 aa, Artificial Sequence
  Synthetically generated peptide
  VARIANT (1)..(17): Xaa = Any Amino Acid
CCEFXXXACNPXACTGA

SEQ ID NO: 13193 - protein, 17 aa, Artificial Sequence
  Synthetically generated peptide
  VARIANT (1)..(17): Xaa = Any Amino Acid
CCEFXXXACNPAXCTGA

SEQ ID NO: 13194 - protein, 17 aa, Artificial Sequence
  Synthetically generated peptide
  VARIANT (1)..(17): Xaa = Any Amino Acid
CCEFXXXACNPACXTGA

SEQ ID NO: 13195 - protein, 17 aa, Artificial Sequence
  Synthetically generated peptide
  VARIANT (1)..(17): Xaa = Any Amino Acid
CCEFXXXACNPACTXGA

SEQ ID NO: 13196 - protein, 17 aa, Artificial Sequence
  Synthetically generated peptide
  VARIANT (1)..(17): Xaa = Any Amino Acid
CCEFXXXACNPACTGXA

SEQ ID NO: 13197 - protein, 16 aa, Artificial Sequence
  Synthetically generated peptide
  VARIANT (1)..(16): Xaa = Any Amino Acid
CCEFXXACXNPACTGA

SEQ ID NO: 13198 - protein, 17 aa, Artificial Sequence
  Synthetically generated peptide
  VARIANT (1)..(17): Xaa = Any Amino Acid
CCEFXXACXXNPACTGA

SEQ ID NO: 13199 - protein, 17 aa, Artificial Sequence
  Synthetically generated peptide
  VARIANT (1)..(17): Xaa = Any Amino Acid
CCEFXXACXNXPACTGA

SEQ ID NO: 13200 - protein, 17 aa, Artificial Sequence
  Synthetically generated peptide
  VARIANT (1)..(17): Xaa = Any Amino Acid
CCEFXXACXNPXACTGA

SEQ ID NO: 13201 - protein, 17 aa, Artificial Sequence
  Synthetically generated peptide
  VARIANT (1)..(17): Xaa = Any Amino Acid
CCEFXXACXNPAXCTGA

SEQ ID NO: 13202 - protein, 17 aa, Artificial Sequence
  Synthetically generated peptide
  VARIANT (1)..(17): Xaa = Any Amino Acid
CCEFXXACXNPACXTGA

SEQ ID NO: 13203 - protein, 17 aa, Artificial Sequence
  Synthetically generated peptide
  VARIANT (1)..(17): Xaa = Any Amino Acid
CCEFXXACXNPACTXGA

SEQ ID NO: 13204 - protein, 17 aa, Artificial Sequence
  Synthetically generated peptide
  VARIANT (1)..(17): Xaa = Any Amino Acid
CCEFXXACXNPACTGXA

SEQ ID NO: 13205 - protein, 16 aa, Artificial Sequence
  Synthetically generated peptide
  VARIANT (1)..(16): Xaa = Any Amino Acid
CCEFXXACNXPACTGA

SEQ ID NO: 13206 - protein, 17 aa, Artificial Sequence
  Synthetically generated peptide
  VARIANT (1)..(17): Xaa = Any Amino Acid
CCEFXXACNXXPACTGA

SEQ ID NO: 13207 - protein, 17 aa, Artificial Sequence
  Synthetically generated peptide
  VARIANT (1)..(17): Xaa = Any Amino Acid
CCEFXXACNXPXACTGA

SEQ ID NO: 13208 - protein, 17 aa, Artificial Sequence
  Synthetically generated peptide
  VARIANT (1)..(17): Xaa = Any Amino Acid
CCEFXXACNXPAXCTGA

SEQ ID NO: 13209 - protein, 17 aa, Artificial Sequence
  Synthetically generated peptide
  VARIANT (1)..(17): Xaa = Any Amino Acid
CCEFXXACNXPACXTGA

SEQ ID NO: 13210 - protein, 17 aa, Artificial Sequence
  Synthetically generated peptide
  VARIANT (1)..(17): Xaa = Any Amino Acid
CCEFXXACNXPACTXGA

SEQ ID NO: 13211 - protein, 17 aa, Artificial Sequence
  Synthetically generated peptide
  VARIANT (1)..(17): Xaa = Any Amino Acid
CCEFXXACNXPACTGXA

SEQ ID NO: 13212 - protein, 16 aa, Artificial Sequence
  Synthetically generated peptide
  VARIANT (1)..(16): Xaa = Any Amino Acid
CCEFXXACNPXACTGA

SEQ ID NO: 13213 - protein, 17 aa, Artificial Sequence
  Synthetically generated peptide
  VARIANT (1)..(17): Xaa = Any Amino Acid
CCEFXXACNPXXACTGA

SEQ ID NO: 13214 - protein, 17 aa, Artificial Sequence
  Synthetically generated peptide
  VARIANT (1)..(17): Xaa = Any Amino Acid
CCEFXXACNPXAXCTGA

SEQ ID NO: 13215 - protein, 17 aa, Artificial Sequence
  Synthetically generated peptide
  VARIANT (1)..(17): Xaa = Any Amino Acid
CCEFXXACNPXACXTGA

SEQ ID NO: 13216 - protein, 17 aa, Artificial Sequence
  Synthetically generated peptide
  VARIANT (1)..(17): Xaa = Any Amino Acid
CCEFXXACNPXACTXGA

SEQ ID NO: 13217 - protein, 17 aa, Artificial Sequence
  Synthetically generated peptide
  VARIANT (1)..(17): Xaa = Any Amino Acid
CCEFXXACNPXACTGXA

SEQ ID NO: 13218 - protein, 16 aa, Artificial Sequence
  Synthetically generated peptide
  VARIANT (1)..(16): Xaa = Any Amino Acid
CCEFXXACNPAXCTGA

SEQ ID NO: 13219 - protein, 17 aa, Artificial Sequence
  Synthetically generated peptide
  VARIANT (1)..(17): Xaa = Any Amino Acid
CCEFXXACNPAXXCTGA

SEQ ID NO: 13220 - protein, 17 aa, Artificial Sequence
  Synthetically generated peptide
  VARIANT (1)..(17): Xaa = Any Amino Acid
CCEFXXACNPAXCXTGA

SEQ ID NO: 13221 - protein, 17 aa, Artificial Sequence
  Synthetically generated peptide
  VARIANT (1)..(17): Xaa = Any Amino Acid
CCEFXXACNPAXCTXGA

SEQ ID NO: 13222 - protein, 17 aa, Artificial Sequence
  Synthetically generated peptide
  VARIANT (1)..(17): Xaa = Any Amino Acid
CCEFXXACNPAXCTGXA

SEQ ID NO: 13223 - protein, 16 aa, Artificial Sequence
  Synthetically generated peptide
  VARIANT (1)..(16): Xaa = Any Amino Acid
CCEFXXACNPACXTGA

SEQ ID NO: 13224 - protein, 17 aa, Artificial Sequence
  Synthetically generated peptide
  VARIANT (1)..(17): Xaa = Any Amino Acid
CCEFXXACNPACXXTGA

SEQ ID NO: 13225 - protein, 17 aa, Artificial Sequence
  Synthetically generated peptide
  VARIANT (1)..(17): Xaa = Any Amino Acid
CCEFXXACNPACXTXGA

SEQ ID NO: 13226 - protein, 17 aa, Artificial Sequence
  Synthetically generated peptide
  VARIANT (1)..(17): Xaa = Any Amino Acid
CCEFXXACNPACXTGXA

SEQ ID NO: 13227 - protein, 16 aa, Artificial Sequence
  Synthetically generated peptide
  VARIANT (1)..(16): Xaa = Any Amino Acid
CCEFXXACNPACTXGA

SEQ ID NO: 13228 - protein, 17 aa, Artificial Sequence
  Synthetically generated peptide
  VARIANT (1)..(17): Xaa = Any Amino Acid
CCEFXXACNPACTXXGA

SEQ ID NO: 13229 - protein, 17 aa, Artificial Sequence
  Synthetically generated peptide
  VARIANT (1)..(17): Xaa = Any Amino Acid
CCEFXXACNPACTXGXA

SEQ ID NO: 13230 - protein, 16 aa, Artificial Sequence
  Synthetically generated peptide
  VARIANT (1)..(16): Xaa = Any Amino Acid
CCEFXXACNPACTGXA

SEQ ID NO: 13231 - protein, 17 aa, Artificial Sequence
  Synthetically generated peptide
  VARIANT (1)..(17): Xaa = Any Amino Acid
CCEFXXACNPACTGXXA

SEQ ID NO: 13232 - protein, 15 aa, Artificial Sequence
  Synthetically generated peptide
  VARIANT (1)..(15): Xaa = Any Amino Acid
CCEFXACXNPACTGA

SEQ ID NO: 13233 - protein, 16 aa, Artificial Sequence
  Synthetically generated peptide
  VARIANT (1)..(16): Xaa = Any Amino Acid
CCEFXACXXNPACTGA

SEQ ID NO: 13234 - protein, 17 aa, Artificial Sequence
  Synthetically generated peptide
  VARIANT (1)..(17): Xaa = Any Amino Acid
CCEFXACXXXNPACTGA

SEQ ID NO: 13235 - protein, 17 aa, Artificial Sequence
  Synthetically generated peptide
  VARIANT (1)..(17): Xaa = Any Amino Acid
CCEFXACXXNXPACTGA

SEQ ID NO: 13236 - protein, 17 aa, Artificial Sequence
  Synthetically generated peptide
  VARIANT (1)..(17): Xaa = Any Amino Acid
CCEFXACXXNPXACTGA

SEQ ID NO: 13237 - protein, 17 aa, Artificial Sequence
  Synthetically generated peptide
  VARIANT (1)..(17): Xaa = Any Amino Acid
CCEFXACXXNPAXCTGA

SEQ ID NO: 13238 - protein, 17 aa, Artificial Sequence
  Synthetically generated peptide
  VARIANT (1)..(17): Xaa = Any Amino Acid
CCEFXACXXNPACXTGA

SEQ ID NO: 13239 - protein, 17 aa, Artificial Sequence
  Synthetically generated peptide
  VARIANT (1)..(17): Xaa = Any Amino Acid
CCEFXACXXNPACTXGA

SEQ ID NO: 13240 - protein, 17 aa, Artificial Sequence
  Synthetically generated peptide
  VARIANT (1)..(17): Xaa = Any Amino Acid
CCEFXACXXNPACTGXA

SEQ ID NO: 13241 - protein, 16 aa, Artificial Sequence
  Synthetically generated peptide
  VARIANT (1)..(16): Xaa = Any Amino Acid
CCEFXACXNXPACTGA

SEQ ID NO: 13242 - protein, 17 aa, Artificial Sequence
  Synthetically generated peptide
  VARIANT (1)..(17): Xaa = Any Amino Acid
CCEFXACXNXXPACTGA

SEQ ID NO: 13243 - protein, 17 aa, Artificial Sequence
  Synthetically generated peptide
  VARIANT (1)..(17): Xaa = Any Amino Acid
CCEFXACXNXPXACTGA

SEQ ID NO: 13244 - protein, 17 aa, Artificial Sequence
  Synthetically generated peptide
  VARIANT (1)..(17): Xaa = Any Amino Acid
CCEFXACXNXPAXCTGA

SEQ ID NO: 13245 - protein, 17 aa, Artificial Sequence
  Synthetically generated peptide
  VARIANT (1)..(17): Xaa = Any Amino Acid
CCEFXACXNXPACXTGA

SEQ ID NO: 13246 - protein, 17 aa, Artificial Sequence
  Synthetically generated peptide
  VARIANT (1)..(17): Xaa = Any Amino Acid
CCEFXACXNXPACTXGA

SEQ ID NO: 13247 - protein, 17 aa, Artificial Sequence
  Synthetically generated peptide
  VARIANT (1)..(17): Xaa = Any Amino Acid
CCEFXACXNXPACTGXA

SEQ ID NO: 13248 - protein, 16 aa, Artificial Sequence
  Synthetically generated peptide
  VARIANT (1)..(16): Xaa = Any Amino Acid
CCEFXACXNPXACTGA

SEQ ID NO: 13249 - protein, 17 aa, Artificial Sequence
  Synthetically generated peptide
  VARIANT (1)..(17): Xaa = Any Amino Acid
CCEFXACXNPXXACTGA

SEQ ID NO: 13250 - protein, 17 aa, Artificial Sequence
  Synthetically generated peptide
  VARIANT (1)..(17): Xaa = Any Amino Acid
CCEFXACXNPXAXCTGA

SEQ ID NO: 13251 - protein, 17 aa, Artificial Sequence
  Synthetically generated peptide
  VARIANT (1)..(17): Xaa = Any Amino Acid
CCEFXACXNPXACXTGA

SEQ ID NO: 13252 - protein, 17 aa, Artificial Sequence
  Synthetically generated peptide
  VARIANT (1)..(17): Xaa = Any Amino Acid
CCEFXACXNPXACTXGA

SEQ ID NO: 13253 - protein, 17 aa, Artificial Sequence
  Synthetically generated peptide
  VARIANT (1)..(17): Xaa = Any Amino Acid
CCEFXACXNPXACTGXA

SEQ ID NO: 13254 - protein, 16 aa, Artificial Sequence
  Synthetically generated peptide
  VARIANT (1)..(16): Xaa = Any Amino Acid
CCEFXACXNPAXCTGA

SEQ ID NO: 13255 - protein, 17 aa, Artificial Sequence
  Synthetically generated peptide
  VARIANT (1)..(17): Xaa = Any Amino Acid
CCEFXACXNPAXXCTGA

SEQ ID NO: 13256 - protein, 17 aa, Artificial Sequence
  Synthetically generated peptide
  VARIANT (1)..(17): Xaa = Any Amino Acid
CCEFXACXNPAXCXTGA

SEQ ID NO: 13257 - protein, 17 aa, Artificial Sequence
  Synthetically generated peptide
  VARIANT (1)..(17): Xaa = Any Amino Acid
CCEFXACXNPAXCTXGA

SEQ ID NO: 13258 - protein, 17 aa, Artificial Sequence
  Synthetically generated peptide
  VARIANT (1)..(17): Xaa = Any Amino Acid
CCEFXACXNPAXCTGXA

SEQ ID NO: 13259 - protein, 16 aa, Artificial Sequence
  Synthetically generated peptide
  VARIANT (1)..(16): Xaa = Any Amino Acid
CCEFXACXNPACXTGA

SEQ ID NO: 13260 - protein, 17 aa, Artificial Sequence
  Synthetically generated peptide
  VARIANT (1)..(17): Xaa = Any Amino Acid
CCEFXACXNPACXXTGA

SEQ ID NO: 13261 - protein, 17 aa, Artificial Sequence
  Synthetically generated peptide
  VARIANT (1)..(17): Xaa = Any Amino Acid
CCEFXACXNPACXTXGA

SEQ ID NO: 13262 - protein, 17 aa, Artificial Sequence
  Synthetically generated peptide
  VARIANT (1)..(17): Xaa = Any Amino Acid
CCEFXACXNPACXTGXA

SEQ ID NO: 13263 - protein, 16 aa, Artificial Sequence
  Synthetically generated peptide
  VARIANT (1)..(16): Xaa = Any Amino Acid
CCEFXACXNPACTXGA

SEQ ID NO: 13264 - protein, 17 aa, Artificial Sequence
  Synthetically generated peptide
  VARIANT (1)..(17): Xaa = Any Amino Acid
CCEFXACXNPACTXXGA

SEQ ID NO: 13265 - protein, 17 aa, Artificial Sequence
  Synthetically generated peptide
  VARIANT (1)..(17): Xaa = Any Amino Acid
CCEFXACXNPACTXGXA

SEQ ID NO: 13266 - protein, 16 aa, Artificial Sequence
  Synthetically generated peptide
  VARIANT (1)..(16): Xaa = Any Amino Acid
CCEFXACXNPACTGXA

SEQ ID NO: 13267 - protein, 17 aa, Artificial Sequence
  Synthetically generated peptide
  VARIANT (1)..(17): Xaa = Any Amino Acid
CCEFXACXNPACTGXXA

SEQ ID NO: 13268 - protein, 15 aa, Artificial Sequence
  Synthetically generated peptide
  VARIANT (1)..(15): Xaa = Any Amino Acid
CCEFXACNXPACTGA

SEQ ID NO: 13269 - protein, 16 aa, Artificial Sequence
  Synthetically generated peptide
  VARIANT (1)..(16): Xaa = Any Amino Acid
CCEFXACNXXPACTGA

SEQ ID NO: 13270 - protein, 17 aa, Artificial Sequence
  Synthetically generated peptide
  VARIANT (1)..(17): Xaa = Any Amino Acid
CCEFXACNXXXPACTGA

SEQ ID NO: 13271 - protein, 17 aa, Artificial Sequence
  Synthetically generated peptide
  VARIANT (1)..(17): Xaa = Any Amino Acid
CCEFXACNXXPXACTGA

SEQ ID NO: 13272 - protein, 17 aa, Artificial Sequence
  Synthetically generated peptide
  VARIANT (1)..(17): Xaa = Any Amino Acid
CCEFXACNXXPAXCTGA

SEQ ID NO: 13273 - protein, 17 aa, Artificial Sequence
  Synthetically generated peptide
  VARIANT (1)..(17): Xaa = Any Amino Acid
CCEFXACNXXPACXTGA

SEQ ID NO: 13274 - protein, 17 aa, Artificial Sequence
  Synthetically generated peptide
  VARIANT (1)..(17): Xaa = Any Amino Acid
CCEFXACNXXPACTXGA

SEQ ID NO: 13275 - protein, 17 aa, Artificial Sequence
  Synthetically generated peptide
  VARIANT (1)..(17): Xaa = Any Amino Acid
CCEFXACNXXPACTGXA

SEQ ID NO: 13276 - protein, 16 aa, Artificial Sequence
  Synthetically generated peptide
  VARIANT (1)..(16): Xaa = Any Amino Acid
CCEFXACNXPXACTGA

SEQ ID NO: 13277 - protein, 17 aa, Artificial Sequence
  Synthetically generated peptide
  VARIANT (1)..(17): Xaa = Any Amino Acid
CCEFXACNXPXXACTGA

SEQ ID NO: 13278 - protein, 17 aa, Artificial Sequence
  Synthetically generated peptide
  VARIANT (1)..(17): Xaa = Any Amino Acid
CCEFXACNXPXAXCTGA

SEQ ID NO: 13279 - protein, 17 aa, Artificial Sequence
  Synthetically generated peptide
  VARIANT (1)..(17): Xaa = Any Amino Acid
CCEFXACNXPXACXTGA

SEQ ID NO: 13280 - protein, 17 aa, Artificial Sequence
  Synthetically generated peptide
  VARIANT (1)..(17): Xaa = Any Amino Acid
CCEFXACNXPXACTXGA

SEQ ID NO: 13281 - protein, 17 aa, Artificial Sequence
  Synthetically generated peptide
  VARIANT (1)..(17): Xaa = Any Amino Acid
CCEFXACNXPXACTGXA

SEQ ID NO: 13282 - protein, 16 aa, Artificial Sequence
  Synthetically generated peptide
  VARIANT (1)..(16): Xaa = Any Amino Acid
CCEFXACNXPAXCTGA

SEQ ID NO: 13283 - protein, 17 aa, Artificial Sequence
  Synthetically generated peptide
  VARIANT (1)..(17): Xaa = Any Amino Acid
CCEFXACNXPAXXCTGA

SEQ ID NO: 13284 - protein, 17 aa, Artificial Sequence
  Synthetically generated peptide
  VARIANT (1)..(17): Xaa = Any Amino Acid
CCEFXACNXPAXCXTGA

SEQ ID NO: 13285 - protein, 17 aa, Artificial Sequence
  Synthetically generated peptide
  VARIANT (1)..(17): Xaa = Any Amino Acid
CCEFXACNXPAXCTXGA

SEQ ID NO: 13286 - protein, 17 aa, Artificial Sequence
  Synthetically generated peptide
  VARIANT (1)..(17): Xaa = Any Amino Acid
CCEFXACNXPAXCTGXA

SEQ ID NO: 13287 - protein, 16 aa, Artificial Sequence
  Synthetically generated peptide
  VARIANT (1)..(16): Xaa = Any Amino Acid
CCEFXACNXPACXTGA

SEQ ID NO: 13288 - protein, 17 aa, Artificial Sequence
  Synthetically generated peptide
  VARIANT (1)..(17): Xaa = Any Amino Acid
CCEFXACNXPACXXTGA

SEQ ID NO: 13289 - protein, 17 aa, Artificial Sequence
  Synthetically generated peptide
  VARIANT (1)..(17): Xaa = Any Amino Acid
CCEFXACNXPACXTXGA

SEQ ID NO: 13290 - protein, 17 aa, Artificial Sequence
  Synthetically generated peptide
  VARIANT (1)..(17): Xaa = Any Amino Acid
CCEFXACNXPACXTGXA

SEQ ID NO: 13291 - protein, 16 aa, Artificial Sequence
  Synthetically generated peptide
  VARIANT (1)..(16): Xaa = Any Amino Acid
CCEFXACNXPACTXGA

SEQ ID NO: 13292 - protein, 17 aa, Artificial Sequence
  Synthetically generated peptide
  VARIANT (1)..(17): Xaa = Any Amino Acid
CCEFXACNXPACTXXGA

SEQ ID NO: 13293 - protein, 17 aa, Artificial Sequence
  Synthetically generated peptide
  VARIANT (1)..(17): Xaa = Any Amino Acid
CCEFXACNXPACTXGXA

SEQ ID NO: 13294 - protein, 16 aa, Artificial Sequence
  Synthetically generated peptide
  VARIANT (1)..(16): Xaa = Any Amino Acid
CCEFXACNXPACTGXA

SEQ ID NO: 13295 - protein, 17 aa, Artificial Sequence
  Synthetically generated peptide
  VARIANT (1)..(17): Xaa = Any Amino Acid
CCEFXACNXPACTGXXA

SEQ ID NO: 13296 - protein, 15 aa, Artificial Sequence
  Synthetically generated peptide
  VARIANT (1)..(15): Xaa = Any Amino Acid
CCEFXACNPXACTGA

SEQ ID NO: 13297 - protein, 16 aa, Artificial Sequence
  Synthetically generated peptide
  VARIANT (1)..(16): Xaa = Any Amino Acid
CCEFXACNPXXACTGA

SEQ ID NO: 13298 - protein, 17 aa, Artificial Sequence
  Synthetically generated peptide
  VARIANT (1)..(17): Xaa = Any Amino Acid
CCEFXACNPXXXACTGA

SEQ ID NO: 13299 - protein, 17 aa, Artificial Sequence
  Synthetically generated peptide
  VARIANT (1)..(17): Xaa = Any Amino Acid
CCEFXACNPXXAXCTGA

SEQ ID NO: 13300 - protein, 17 aa, Artificial Sequence
  Synthetically generated peptide
  VARIANT (1)..(17): Xaa = Any Amino Acid
CCEFXACNPXXACXTGA

SEQ ID NO: 13301 - protein, 17 aa, Artificial Sequence
  Synthetically generated peptide
  VARIANT (1)..(17): Xaa = Any Amino Acid
CCEFXACNPXXACTXGA

SEQ ID NO: 13302 - protein, 17 aa, Artificial Sequence
  Synthetically generated peptide
  VARIANT (1)..(17): Xaa = Any Amino Acid
CCEFXACNPXXACTGXA

SEQ ID NO: 13303 - protein, 16 aa, Artificial Sequence
  Synthetically generated peptide
  VARIANT (1)..(16): Xaa = Any Amino Acid
CCEFXACNPXAXCTGA

SEQ ID NO: 13304 - protein, 17 aa, Artificial Sequence
  Synthetically generated peptide
  VARIANT (1)..(17): Xaa = Any Amino Acid
CCEFXACNPXAXXCTGA

SEQ ID NO: 13305 - protein, 17 aa, Artificial Sequence
  Synthetically generated peptide
  VARIANT (1)..(17): Xaa = Any Amino Acid
CCEFXACNPXAXCXTGA

SEQ ID NO: 13306 - protein, 17 aa, Artificial Sequence
  Synthetically generated peptide
  VARIANT (1)..(17): Xaa = Any Amino Acid
CCEFXACNPXAXCTXGA

SEQ ID NO: 13307 - protein, 17 aa, Artificial Sequence
  Synthetically generated peptide
  VARIANT (1)..(17): Xaa = Any Amino Acid
CCEFXACNPXAXCTGXA

SEQ ID NO: 13308 - protein, 16 aa, Artificial Sequence
  Synthetically generated peptide
  VARIANT (1)..(16): Xaa = Any Amino Acid
CCEFXACNPXACXTGA

SEQ ID NO: 13309 - protein, 17 aa, Artificial Sequence
  Synthetically generated peptide
  VARIANT (1)..(17): Xaa = Any Amino Acid
CCEFXACNPXACXXTGA

SEQ ID NO: 13310 - protein, 17 aa, Artificial Sequence
  Synthetically generated peptide
  VARIANT (1)..(17): Xaa = Any Amino Acid
CCEFXACNPXACXTXGA

SEQ ID NO: 13311 - protein, 17 aa, Artificial Sequence
  Synthetically generated peptide
  VARIANT (1)..(17): Xaa = Any Amino Acid
CCEFXACNPXACXTGXA

SEQ ID NO: 13312 - protein, 16 aa, Artificial Sequence
  Synthetically generated peptide
  VARIANT (1)..(16): Xaa = Any Amino Acid
CCEFXACNPXACTXGA

SEQ ID NO: 13313 - protein, 17 aa, Artificial Sequence
  Synthetically generated peptide
  VARIANT (1)..(17): Xaa = Any Amino Acid
CCEFXACNPXACTXXGA

SEQ ID NO: 13314 - protein, 17 aa, Artificial Sequence
  Synthetically generated peptide
  VARIANT (1)..(17): Xaa = Any Amino Acid
CCEFXACNPXACTXGXA

SEQ ID NO: 13315 - protein, 16 aa, Artificial Sequence
  Synthetically generated peptide
  VARIANT (1)..(16): Xaa = Any Amino Acid
CCEFXACNPXACTGXA

SEQ ID NO: 13316 - protein, 17 aa, Artificial Sequence
  Synthetically generated peptide
  VARIANT (1)..(17): Xaa = Any Amino Acid
CCEFXACNPXACTGXXA

SEQ ID NO: 13317 - protein, 15 aa, Artificial Sequence
  Synthetically generated peptide
  VARIANT (1)..(15): Xaa = Any Amino Acid
CCEFXACNPAXCTGA

SEQ ID NO: 13318 - protein, 16 aa, Artificial Sequence
  Synthetically generated peptide
  VARIANT (1)..(16): Xaa = Any Amino Acid
CCEFXACNPAXXCTGA

SEQ ID NO: 13319 - protein, 17 aa, Artificial Sequence
  Synthetically generated peptide
  VARIANT (1)..(17): Xaa = Any Amino Acid
CCEFXACNPAXXXCTGA

SEQ ID NO: 13320 - protein, 17 aa, Artificial Sequence
  Synthetically generated peptide
  VARIANT (1)..(17): Xaa = Any Amino Acid
CCEFXACNPAXXCXTGA

SEQ ID NO: 13321 - protein, 17 aa, Artificial Sequence
  Synthetically generated peptide
  VARIANT (1)..(17): Xaa = Any Amino Acid
CCEFXACNPAXXCTXGA

SEQ ID NO: 13322 - protein, 17 aa, Artificial Sequence
  Synthetically generated peptide
  VARIANT (1)..(17): Xaa = Any Amino Acid
CCEFXACNPAXXCTGXA

SEQ ID NO: 13323 - protein, 16 aa, Artificial Sequence
  Synthetically generated peptide
  VARIANT (1)..(16): Xaa = Any Amino Acid
CCEFXACNPAXCXTGA

SEQ ID NO: 13324 - protein, 17 aa, Artificial Sequence
  Synthetically generated peptide
  VARIANT (1)..(17): Xaa = Any Amino Acid
CCEFXACNPAXCXXTGA

SEQ ID NO: 13325 - protein, 17 aa, Artificial Sequence
  Synthetically generated peptide
  VARIANT (1)..(17): Xaa = Any Amino Acid
CCEFXACNPAXCXTXGA

SEQ ID NO: 13326 - protein, 17 aa, Artificial Sequence
  Synthetically generated peptide
  VARIANT (1)..(17): Xaa = Any Amino Acid
CCEFXACNPAXCXTGXA

SEQ ID NO: 13327 - protein, 16 aa, Artificial Sequence
  Synthetically generated peptide
  VARIANT (1)..(16): Xaa = Any Amino Acid
CCEFXACNPAXCTXGA

SEQ ID NO: 13328 - protein, 17 aa, Artificial Sequence
  Synthetically generated peptide
  VARIANT (1)..(17): Xaa = Any Amino Acid
CCEFXACNPAXCTXXGA

SEQ ID NO: 13329 - protein, 17 aa, Artificial Sequence
  Synthetically generated peptide
  VARIANT (1)..(17): Xaa = Any Amino Acid
CCEFXACNPAXCTXGXA

SEQ ID NO: 13330 - protein, 16 aa, Artificial Sequence
  Synthetically generated peptide
  VARIANT (1)..(16): Xaa = Any Amino Acid
CCEFXACNPAXCTGXA

SEQ ID NO: 13331 - protein, 17 aa, Artificial Sequence
  Synthetically generated peptide
  VARIANT (1)..(17): Xaa = Any Amino Acid
CCEFXACNPAXCTGXXA

SEQ ID NO: 13332 - protein, 15 aa, Artificial Sequence
  Synthetically generated peptide
  VARIANT (1)..(15): Xaa = Any Amino Acid
CCEFXACNPACXTGA

SEQ ID NO: 13333 - protein, 16 aa, Artificial Sequence
  Synthetically generated peptide
  VARIANT (1)..(16): Xaa = Any Amino Acid
CCEFXACNPACXXTGA

SEQ ID NO: 13334 - protein, 17 aa, Artificial Sequence
  Synthetically generated peptide
  VARIANT (1)..(17): Xaa = Any Amino Acid
CCEFXACNPACXXXTGA

SEQ ID NO: 13335 - protein, 17 aa, Artificial Sequence
  Synthetically generated peptide
  VARIANT (1)..(17): Xaa = Any Amino Acid
CCEFXACNPACXXTXGA

SEQ ID NO: 13336 - protein, 17 aa, Artificial Sequence
  Synthetically generated peptide
  VARIANT (1)..(17): Xaa = Any Amino Acid
CCEFXACNPACXXTGXA

SEQ ID NO: 13337 - protein, 16 aa, Artificial Sequence
  Synthetically generated peptide
  VARIANT (1)..(16): Xaa = Any Amino Acid
CCEFXACNPACXTXGA

SEQ ID NO: 13338 - protein, 17 aa, Artificial Sequence
  Synthetically generated peptide
  VARIANT (1)..(17): Xaa = Any Amino Acid
CCEFXACNPACXTXXGA

SEQ ID NO: 13339 - protein, 17 aa, Artificial Sequence
  Synthetically generated peptide
  VARIANT (1)..(17): Xaa = Any Amino Acid
CCEFXACNPACXTXGXA

SEQ ID NO: 13340 - protein, 16 aa, Artificial Sequence
  Synthetically generated peptide
  VARIANT (1)..(16): Xaa = Any Amino Acid
CCEFXACNPACXTGXA

SEQ ID NO: 13341 - protein, 17 aa, Artificial Sequence
  Synthetically generated peptide
  VARIANT (1)..(17): Xaa = Any Amino Acid
CCEFXACNPACXTGXXA

SEQ ID NO: 13342 - protein, 15 aa, Artificial Sequence
  Synthetically generated peptide
  VARIANT (1)..(15): Xaa = Any Amino Acid
CCEFXACNPACTXGA

SEQ ID NO: 13343 - protein, 16 aa, Artificial Sequence
  Synthetically generated peptide
  VARIANT (1)..(16): Xaa = Any Amino Acid
CCEFXACNPACTXXGA

SEQ ID NO: 13344 - protein, 17 aa, Artificial Sequence
  Synthetically generated peptide
  VARIANT (1)..(17): Xaa = Any Amino Acid
CCEFXACNPACTXXXGA

SEQ ID NO: 13345 - protein, 17 aa, Artificial Sequence
  Synthetically generated peptide
  VARIANT (1)..(17): Xaa = Any Amino Acid
CCEFXACNPACTXXGXA

SEQ ID NO: 13346 - protein, 16 aa, Artificial Sequence
  Synthetically generated peptide
  VARIANT (1)..(16): Xaa = Any Amino Acid
CCEFXACNPACTXGXA

SEQ ID NO: 13347 - protein, 17 aa, Artificial Sequence
  Synthetically generated peptide
  VARIANT (1)..(17): Xaa = Any Amino Acid
CCEFXACNPACTXGXXA

SEQ ID NO: 13348 - protein, 15 aa, Artificial Sequence
  Synthetically generated peptide
  VARIANT (1)..(15): Xaa = Any Amino Acid
CCEFXACNPACTGXA

SEQ ID NO: 13349 - protein, 16 aa, Artificial Sequence
  Synthetically generated peptide
  VARIANT (1)..(16): Xaa = Any Amino Acid
CCEFXACNPACTGXXA

SEQ ID NO: 13350 - protein, 17 aa, Artificial Sequence
  Synthetically generated peptide
  VARIANT (1)..(17): Xaa = Any Amino Acid
CCEFXACNPACTGXXXA

SEQ ID NO: 13351 - protein, 14 aa, Artificial Sequence
  Synthetically generated peptide
  VARIANT (1)..(14): Xaa = Any Amino Acid
CCEFACXNPACTGA

SEQ ID NO: 13352 - protein, 15 aa, Artificial Sequence
  Synthetically generated peptide
  VARIANT (1)..(15): Xaa = Any Amino Acid
CCEFACXXNPACTGA

SEQ ID NO: 13353 - protein, 16 aa, Artificial Sequence
  Synthetically generated peptide
  VARIANT (1)..(16): Xaa = Any Amino Acid
CCEFACXXXNPACTGA

SEQ ID NO: 13354 - protein, 17 aa, Artificial Sequence
  Synthetically generated peptide
  VARIANT (1)..(17): Xaa = Any Amino Acid
CCEFACXXXXNPACTGA

SEQ ID NO: 13355 - protein, 17 aa, Artificial Sequence
  Synthetically generated peptide
  VARIANT (1)..(17): Xaa = Any Amino Acid
CCEFACXXXNXPACTGA

SEQ ID NO: 13356 - protein, 17 aa, Artificial Sequence
  Synthetically generated peptide
  VARIANT (1)..(17): Xaa = Any Amino Acid
CCEFACXXXNPXACTGA

SEQ ID NO: 13357 - protein, 17 aa, Artificial Sequence
  Synthetically generated peptide
  VARIANT (1)..(17): Xaa = Any Amino Acid
CCEFACXXXNPAXCTGA

SEQ ID NO: 13358 - protein, 17 aa, Artificial Sequence
  Synthetically generated peptide
  VARIANT (1)..(17): Xaa = Any Amino Acid
CCEFACXXXNPACXTGA

SEQ ID NO: 13359 - protein, 17 aa, Artificial Sequence
  Synthetically generated peptide
  VARIANT (1)..(17): Xaa = Any Amino Acid
CCEFACXXXNPACTXGA

SEQ ID NO: 13360 - protein, 17 aa, Artificial Sequence
  Synthetically generated peptide
  VARIANT (1)..(17): Xaa = Any Amino Acid
CCEFACXXXNPACTGXA

SEQ ID NO: 13361 - protein, 16 aa, Artificial Sequence
  Synthetically generated peptide
  VARIANT (1)..(16): Xaa = Any Amino Acid
CCEFACXXNXPACTGA

SEQ ID NO: 13362 - protein, 17 aa, Artificial Sequence
  Synthetically generated peptide
  VARIANT (1)..(17): Xaa = Any Amino Acid
CCEFACXXNXXPACTGA

SEQ ID NO: 13363 - protein, 17 aa, Artificial Sequence
  Synthetically generated peptide
  VARIANT (1)..(17): Xaa = Any Amino Acid
CCEFACXXNXPXACTGA

SEQ ID NO: 13364 - protein, 17 aa, Artificial Sequence
  Synthetically generated peptide
  VARIANT (1)..(17): Xaa = Any Amino Acid
CCEFACXXNXPAXCTGA

SEQ ID NO: 13365 - protein, 17 aa, Artificial Sequence
  Synthetically generated peptide
  VARIANT (1)..(17): Xaa = Any Amino Acid
CCEFACXXNXPACXTGA

SEQ ID NO: 13366 - protein, 17 aa, Artificial Sequence
  Synthetically generated peptide
  VARIANT (1)..(17): Xaa = Any Amino Acid
CCEFACXXNXPACTXGA

SEQ ID NO: 13367 - protein, 17 aa, Artificial Sequence
  Synthetically generated peptide
  VARIANT (1)..(17): Xaa = Any Amino Acid
CCEFACXXNXPACTGXA

SEQ ID NO: 13368 - protein, 16 aa, Artificial Sequence
  Synthetically generated peptide
  VARIANT (1)..(16): Xaa = Any Amino Acid
CCEFACXXNPXACTGA

SEQ ID NO: 13369 - protein, 17 aa, Artificial Sequence
  Synthetically generated peptide
  VARIANT (1)..(17): Xaa = Any Amino Acid
CCEFACXXNPXXACTGA

SEQ ID NO: 13370 - protein, 17 aa, Artificial Sequence
  Synthetically generated peptide
  VARIANT (1)..(17): Xaa = Any Amino Acid
CCEFACXXNPXAXCTGA

SEQ ID NO: 13371 - protein, 17 aa, Artificial Sequence
  Synthetically generated peptide
  VARIANT (1)..(17): Xaa = Any Amino Acid
CCEFACXXNPXACXTGA

SEQ ID NO: 13372 - protein, 17 aa, Artificial Sequence
  Synthetically generated peptide
  VARIANT (1)..(17): Xaa = Any Amino Acid
CCEFACXXNPXACTXGA

SEQ ID NO: 13373 - protein, 17 aa, Artificial Sequence
  Synthetically generated peptide
  VARIANT (1)..(17): Xaa = Any Amino Acid
CCEFACXXNPXACTGXA

SEQ ID NO: 13374 - protein, 16 aa, Artificial Sequence
  Synthetically generated peptide
  VARIANT (1)..(16): Xaa = Any Amino Acid
CCEFACXXNPAXCTGA

SEQ ID NO: 13375 - protein, 17 aa, Artificial Sequence
  Synthetically generated peptide
  VARIANT (1)..(17): Xaa = Any Amino Acid
CCEFACXXNPAXXCTGA

SEQ ID NO: 13376 - protein, 17 aa, Artificial Sequence
  Synthetically generated peptide
  VARIANT (1)..(17): Xaa = Any Amino Acid
CCEFACXXNPAXCXTGA

SEQ ID NO: 13377 - protein, 17 aa, Artificial Sequence
  Synthetically generated peptide
  VARIANT (1)..(17): Xaa = Any Amino Acid
CCEFACXXNPAXCTXGA

SEQ ID NO: 13378 - protein, 17 aa, Artificial Sequence
  Synthetically generated peptide
  VARIANT (1)..(17): Xaa = Any Amino Acid
CCEFACXXNPAXCTGXA

SEQ ID NO: 13379 - protein, 16 aa, Artificial Sequence
  Synthetically generated peptide
  VARIANT (1)..(16): Xaa = Any Amino Acid
CCEFACXXNPACXTGA

SEQ ID NO: 13380 - protein, 17 aa, Artificial Sequence
  Synthetically generated peptide
  VARIANT (1)..(17): Xaa = Any Amino Acid
CCEFACXXNPACXXTGA

SEQ ID NO: 13381 - protein, 17 aa, Artificial Sequence
  Synthetically generated peptide
  VARIANT (1)..(17): Xaa = Any Amino Acid
CCEFACXXNPACXTXGA

SEQ ID NO: 13382 - protein, 17 aa, Artificial Sequence
  Synthetically generated peptide
  VARIANT (1)..(17): Xaa = Any Amino Acid
CCEFACXXNPACXTGXA

SEQ ID NO: 13383 - protein, 16 aa, Artificial Sequence
  Synthetically generated peptide
  VARIANT (1)..(16): Xaa = Any Amino Acid
CCEFACXXNPACTXGA

SEQ ID NO: 13384 - protein, 17 aa, Artificial Sequence
  Synthetically generated peptide
  VARIANT (1)..(17): Xaa = Any Amino Acid
CCEFACXXNPACTXXGA

SEQ ID NO: 13385 - protein, 17 aa, Artificial Sequence
  Synthetically generated peptide
  VARIANT (1)..(17): Xaa = Any Amino Acid
CCEFACXXNPACTXGXA

SEQ ID NO: 13386 - protein, 16 aa, Artificial Sequence
  Synthetically generated peptide
  VARIANT (1)..(16): Xaa = Any Amino Acid
CCEFACXXNPACTGXA

SEQ ID NO: 13387 - protein, 17 aa, Artificial Sequence
  Synthetically generated peptide
  VARIANT (1)..(17): Xaa = Any Amino Acid
CCEFACXXNPACTGXXA

SEQ ID NO: 13388 - protein, 15 aa, Artificial Sequence
  Synthetically generated peptide
  VARIANT (1)..(15): Xaa = Any Amino Acid
CCEFACXNXPACTGA

SEQ ID NO: 13389 - protein, 16 aa, Artificial Sequence
  Synthetically generated peptide
  VARIANT (1)..(16): Xaa = Any Amino Acid
CCEFACXNXXPACTGA

SEQ ID NO: 13390 - protein, 17 aa, Artificial Sequence
  Synthetically generated peptide
  VARIANT (1)..(17): Xaa = Any Amino Acid
CCEFACXNXXXPACTGA

SEQ ID NO: 13391 - protein, 17 aa, Artificial Sequence
  Synthetically generated peptide
  VARIANT (1)..(17): Xaa = Any Amino Acid
CCEFACXNXXPXACTGA

SEQ ID NO: 13392 - protein, 17 aa, Artificial Sequence
  Synthetically generated peptide
  VARIANT (1)..(17): Xaa = Any Amino Acid
CCEFACXNXXPAXCTGA

SEQ ID NO: 13393 - protein, 17 aa, Artificial Sequence
  Synthetically generated peptide
  VARIANT (1)..(17): Xaa = Any Amino Acid
CCEFACXNXXPACXTGA

SEQ ID NO: 13394 - protein, 17 aa, Artificial Sequence
  Synthetically generated peptide
  VARIANT (1)..(17): Xaa = Any Amino Acid
CCEFACXNXXPACTXGA

SEQ ID NO: 13395 - protein, 17 aa, Artificial Sequence
  Synthetically generated peptide
  VARIANT (1)..(17): Xaa = Any Amino Acid
CCEFACXNXXPACTGXA

SEQ ID NO: 13396 - protein, 16 aa, Artificial Sequence
  Synthetically generated peptide
  VARIANT (1)..(16): Xaa = Any Amino Acid
CCEFACXNXPXACTGA

SEQ ID NO: 13397 - protein, 17 aa, Artificial Sequence
  Synthetically generated peptide
  VARIANT (1)..(17): Xaa = Any Amino Acid
CCEFACXNXPXXACTGA

SEQ ID NO: 13398 - protein, 17 aa, Artificial Sequence
  Synthetically generated peptide
  VARIANT (1)..(17): Xaa = Any Amino Acid
CCEFACXNXPXAXCTGA

SEQ ID NO: 13399 - protein, 17 aa, Artificial Sequence
  Synthetically generated peptide
  VARIANT (1)..(17): Xaa = Any Amino Acid
CCEFACXNXPXACXTGA

SEQ ID NO: 13400 - protein, 17 aa, Artificial Sequence
  Synthetically generated peptide
  VARIANT (1)..(17): Xaa = Any Amino Acid
CCEFACXNXPXACTXGA

SEQ ID NO: 13401 - protein, 17 aa, Artificial Sequence
  Synthetically generated peptide
  VARIANT (1)..(17): Xaa = Any Amino Acid
CCEFACXNXPXACTGXA

SEQ ID NO: 13402 - protein, 16 aa, Artificial Sequence
  Synthetically generated peptide
  VARIANT (1)..(16): Xaa = Any Amino Acid
CCEFACXNXPAXCTGA

SEQ ID NO: 13403 - protein, 17 aa, Artificial Sequence
  Synthetically generated peptide
  VARIANT (1)..(17): Xaa = Any Amino Acid
CCEFACXNXPAXXCTGA

SEQ ID NO: 13404 - protein, 17 aa, Artificial Sequence
  Synthetically generated peptide
  VARIANT (1)..(17): Xaa = Any Amino Acid
CCEFACXNXPAXCXTGA

SEQ ID NO: 13405 - protein, 17 aa, Artificial Sequence
  Synthetically generated peptide
  VARIANT (1)..(17): Xaa = Any Amino Acid
CCEFACXNXPAXCTXGA

SEQ ID NO: 13406 - protein, 17 aa, Artificial Sequence
  Synthetically generated peptide
  VARIANT (1)..(17): Xaa = Any Amino Acid
CCEFACXNXPAXCTGXA

SEQ ID NO: 13407 - protein, 16 aa, Artificial Sequence
  Synthetically generated peptide
  VARIANT (1)..(16): Xaa = Any Amino Acid
CCEFACXNXPACXTGA

SEQ ID NO: 13408 - protein, 17 aa, Artificial Sequence
  Synthetically generated peptide
  VARIANT (1)..(17): Xaa = Any Amino Acid
CCEFACXNXPACXXTGA

SEQ ID NO: 13409 - protein, 17 aa, Artificial Sequence
  Synthetically generated peptide
  VARIANT (1)..(17): Xaa = Any Amino Acid
CCEFACXNXPACXTXGA

SEQ ID NO: 13410 - protein, 17 aa, Artificial Sequence
  Synthetically generated peptide
  VARIANT (1)..(17): Xaa = Any Amino Acid
CCEFACXNXPACXTGXA

SEQ ID NO: 13411 - protein, 16 aa, Artificial Sequence
  Synthetically generated peptide
  VARIANT (1)..(16): Xaa = Any Amino Acid
CCEFACXNXPACTXGA

SEQ ID NO: 13412 - protein, 17 aa, Artificial Sequence
  Synthetically generated peptide
  VARIANT (1)..(17): Xaa = Any Amino Acid
CCEFACXNXPACTXXGA

SEQ ID NO: 13413 - protein, 17 aa, Artificial Sequence
  Synthetically generated peptide
  VARIANT (1)..(17): Xaa = Any Amino Acid
CCEFACXNXPACTXGXA

SEQ ID NO: 13414 - protein, 16 aa, Artificial Sequence
  Synthetically generated peptide
  VARIANT (1)..(16): Xaa = Any Amino Acid
CCEFACXNXPACTGXA

SEQ ID NO: 13415 - protein, 17 aa, Artificial Sequence
  Synthetically generated peptide
  VARIANT (1)..(17): Xaa = Any Amino Acid
CCEFACXNXPACTGXXA

SEQ ID NO: 13416 - protein, 15 aa, Artificial Sequence
  Synthetically generated peptide
  VARIANT (1)..(15): Xaa = Any Amino Acid
CCEFACXNPXACTGA

SEQ ID NO: 13417 - protein, 16 aa, Artificial Sequence
  Synthetically generated peptide
  VARIANT (1)..(16): Xaa = Any Amino Acid
CCEFACXNPXXACTGA

SEQ ID NO: 13418 - protein, 17 aa, Artificial Sequence
  Synthetically generated peptide
  VARIANT (1)..(17): Xaa = Any Amino Acid
CCEFACXNPXXXACTGA

SEQ ID NO: 13419 - protein, 17 aa, Artificial Sequence
  Synthetically generated peptide
  VARIANT (1)..(17): Xaa = Any Amino Acid
CCEFACXNPXXAXCTGA

SEQ ID NO: 13420 - protein, 17 aa, Artificial Sequence
  Synthetically generated peptide
  VARIANT (1)..(17): Xaa = Any Amino Acid
CCEFACXNPXXACXTGA

SEQ ID NO: 13421 - protein, 17 aa, Artificial Sequence
  Synthetically generated peptide
  VARIANT (1)..(17): Xaa = Any Amino Acid
CCEFACXNPXXACTXGA

SEQ ID NO: 13422 - protein, 17 aa, Artificial Sequence
  Synthetically generated peptide
  VARIANT (1)..(17): Xaa = Any Amino Acid
CCEFACXNPXXACTGXA

SEQ ID NO: 13423 - protein, 16 aa, Artificial Sequence
  Synthetically generated peptide
  VARIANT (1)..(16): Xaa = Any Amino Acid
CCEFACXNPXAXCTGA

SEQ ID NO: 13424 - protein, 17 aa, Artificial Sequence
  Synthetically generated peptide
  VARIANT (1)..(17): Xaa = Any Amino Acid
CCEFACXNPXAXXCTGA

SEQ ID NO: 13425 - protein, 17 aa, Artificial Sequence
  Synthetically generated peptide
  VARIANT (1)..(17): Xaa = Any Amino Acid
CCEFACXNPXAXCXTGA

SEQ ID NO: 13426 - protein, 17 aa, Artificial Sequence
  Synthetically generated peptide
  VARIANT (1)..(17): Xaa = Any Amino Acid
CCEFACXNPXAXCTXGA

SEQ ID NO: 13427 - protein, 17 aa, Artificial Sequence
  Synthetically generated peptide
  VARIANT (1)..(17): Xaa = Any Amino Acid
CCEFACXNPXAXCTGXA

SEQ ID NO: 13428 - protein, 16 aa, Artificial Sequence
  Synthetically generated peptide
  VARIANT (1)..(16): Xaa = Any Amino Acid
CCEFACXNPXACXTGA

SEQ ID NO: 13429 - protein, 17 aa, Artificial Sequence
  Synthetically generated peptide
  VARIANT (1)..(17): Xaa = Any Amino Acid
CCEFACXNPXACXXTGA

SEQ ID NO: 13430 - protein, 17 aa, Artificial Sequence
  Synthetically generated peptide
  VARIANT (1)..(17): Xaa = Any Amino Acid
CCEFACXNPXACXTXGA

SEQ ID NO: 13431 - protein, 17 aa, Artificial Sequence
  Synthetically generated peptide
  VARIANT (1)..(17): Xaa = Any Amino Acid
CCEFACXNPXACXTGXA

SEQ ID NO: 13432 - protein, 16 aa, Artificial Sequence
  Synthetically generated peptide
  VARIANT (1)..(16): Xaa = Any Amino Acid
CCEFACXNPXACTXGA

SEQ ID NO: 13433 - protein, 17 aa, Artificial Sequence
  Synthetically generated peptide
  VARIANT (1)..(17): Xaa = Any Amino Acid
CCEFACXNPXACTXXGA

SEQ ID NO: 13434 - protein, 17 aa, Artificial Sequence
  Synthetically generated peptide
  VARIANT (1)..(17): Xaa = Any Amino Acid
CCEFACXNPXACTXGXA

SEQ ID NO: 13435 - protein, 16 aa, Artificial Sequence
  Synthetically generated peptide
  VARIANT (1)..(16): Xaa = Any Amino Acid
CCEFACXNPXACTGXA

SEQ ID NO: 13436 - protein, 17 aa, Artificial Sequence
  Synthetically generated peptide
  VARIANT (1)..(17): Xaa = Any Amino Acid
CCEFACXNPXACTGXXA

SEQ ID NO: 13437 - protein, 15 aa, Artificial Sequence
  Synthetically generated peptide
  VARIANT (1)..(15): Xaa = Any Amino Acid
CCEFACXNPAXCTGA

SEQ ID NO: 13438 - protein, 16 aa, Artificial Sequence
  Synthetically generated peptide
  VARIANT (1)..(16): Xaa = Any Amino Acid
CCEFACXNPAXXCTGA

SEQ ID NO: 13439 - protein, 17 aa, Artificial Sequence
  Synthetically generated peptide
  VARIANT (1)..(17): Xaa = Any Amino Acid
CCEFACXNPAXXXCTGA

SEQ ID NO: 13440 - protein, 17 aa, Artificial Sequence
  Synthetically generated peptide
  VARIANT (1)..(17): Xaa = Any Amino Acid
CCEFACXNPAXXCXTGA

SEQ ID NO: 13441 - protein, 17 aa, Artificial Sequence
  Synthetically generated peptide
  VARIANT (1)..(17): Xaa = Any Amino Acid
CCEFACXNPAXXCTXGA

SEQ ID NO: 13442 - protein, 17 aa, Artificial Sequence
  Synthetically generated peptide
  VARIANT (1)..(17): Xaa = Any Amino Acid
CCEFACXNPAXXCTGXA

SEQ ID NO: 13443 - protein, 16 aa, Artificial Sequence
  Synthetically generated peptide
  VARIANT (1)..(16): Xaa = Any Amino Acid
CCEFACXNPAXCXTGA

SEQ ID NO: 13444 - protein, 17 aa, Artificial Sequence
  Synthetically generated peptide
  VARIANT (1)..(17): Xaa = Any Amino Acid
CCEFACXNPAXCXXTGA

SEQ ID NO: 13445 - protein, 17 aa, Artificial Sequence
  Synthetically generated peptide
  VARIANT (1)..(17): Xaa = Any Amino Acid
CCEFACXNPAXCXTXGA

SEQ ID NO: 13446 - protein, 17 aa, Artificial Sequence
  Synthetically generated peptide
  VARIANT (1)..(17): Xaa = Any Amino Acid
CCEFACXNPAXCXTGXA

SEQ ID NO: 13447 - protein, 16 aa, Artificial Sequence
  Synthetically generated peptide
  VARIANT (1)..(16): Xaa = Any Amino Acid
CCEFACXNPAXCTXGA

SEQ ID NO: 13448 - protein, 17 aa, Artificial Sequence
  Synthetically generated peptide
  VARIANT (1)..(17): Xaa = Any Amino Acid
CCEFACXNPAXCTXXGA

SEQ ID NO: 13449 - protein, 17 aa, Artificial Sequence
  Synthetically generated peptide
  VARIANT (1)..(17): Xaa = Any Amino Acid
CCEFACXNPAXCTXGXA

SEQ ID NO: 13450 - protein, 16 aa, Artificial Sequence
  Synthetically generated peptide
  VARIANT (1)..(16): Xaa = Any Amino Acid
CCEFACXNPAXCTGXA

SEQ ID NO: 13451 - protein, 17 aa, Artificial Sequence
  Synthetically generated peptide
  VARIANT (1)..(17): Xaa = Any Amino Acid
CCEFACXNPAXCTGXXA

SEQ ID NO: 13452 - protein, 15 aa, Artificial Sequence
  Synthetically generated peptide
  VARIANT (1)..(15): Xaa = Any Amino Acid
CCEFACXNPACXTGA

SEQ ID NO: 13453 - protein, 16 aa, Artificial Sequence
  Synthetically generated peptide
  VARIANT (1)..(16): Xaa = Any Amino Acid
CCEFACXNPACXXTGA

SEQ ID NO: 13454 - protein, 17 aa, Artificial Sequence
  Synthetically generated peptide
  VARIANT (1)..(17): Xaa = Any Amino Acid
CCEFACXNPACXXXTGA

SEQ ID NO: 13455 - protein, 17 aa, Artificial Sequence
  Synthetically generated peptide
  VARIANT (1)..(17): Xaa = Any Amino Acid
CCEFACXNPACXXTXGA

SEQ ID NO: 13456 - protein, 17 aa, Artificial Sequence
  Synthetically generated peptide
  VARIANT (1)..(17): Xaa = Any Amino Acid
CCEFACXNPACXXTGXA

SEQ ID NO: 13457 - protein, 16 aa, Artificial Sequence
  Synthetically generated peptide
  VARIANT (1)..(16): Xaa = Any Amino Acid
CCEFACXNPACXTXGA

SEQ ID NO: 13458 - protein, 17 aa, Artificial Sequence
  Synthetically generated peptide
  VARIANT (1)..(17): Xaa = Any Amino Acid
CCEFACXNPACXTXXGA

SEQ ID NO: 13459 - protein, 17 aa, Artificial Sequence
  Synthetically generated peptide
  VARIANT (1)..(17): Xaa = Any Amino Acid
CCEFACXNPACXTXGXA

SEQ ID NO: 13460 - protein, 16 aa, Artificial Sequence
  Synthetically generated peptide
  VARIANT (1)..(16): Xaa = Any Amino Acid
CCEFACXNPACXTGXA

SEQ ID NO: 13461 - protein, 17 aa, Artificial Sequence
  Synthetically generated peptide
  VARIANT (1)..(17): Xaa = Any Amino Acid
CCEFACXNPACXTGXXA

SEQ ID NO: 13462 - protein, 15 aa, Artificial Sequence
  Synthetically generated peptide
  VARIANT (1)..(15): Xaa = Any Amino Acid
CCEFACXNPACTXGA

SEQ ID NO: 13463 - protein, 16 aa, Artificial Sequence
  Synthetically generated peptide
  VARIANT (1)..(16): Xaa = Any Amino Acid
CCEFACXNPACTXXGA

SEQ ID NO: 13464 - protein, 17 aa, Artificial Sequence
  Synthetically generated peptide
  VARIANT (1)..(17): Xaa = Any Amino Acid
CCEFACXNPACTXXXGA

SEQ ID NO: 13465 - protein, 17 aa, Artificial Sequence
  Synthetically generated peptide
  VARIANT (1)..(17): Xaa = Any Amino Acid
CCEFACXNPACTXXGXA

SEQ ID NO: 13466 - protein, 16 aa, Artificial Sequence
  Synthetically generated peptide
  VARIANT (1)..(16): Xaa = Any Amino Acid
CCEFACXNPACTXGXA

SEQ ID NO: 13467 - protein, 17 aa, Artificial Sequence
  Synthetically generated peptide
  VARIANT (1)..(17): Xaa = Any Amino Acid
CCEFACXNPACTXGXXA

SEQ ID NO: 13468 - protein, 15 aa, Artificial Sequence
  Synthetically generated peptide
  VARIANT (1)..(15): Xaa = Any Amino Acid
CCEFACXNPACTGXA

SEQ ID NO: 13469 - protein, 16 aa, Artificial Sequence
  Synthetically generated peptide
  VARIANT (1)..(16): Xaa = Any Amino Acid
CCEFACXNPACTGXXA

SEQ ID NO: 13470 - protein, 17 aa, Artificial Sequence
  Synthetically generated peptide
  VARIANT (1)..(17): Xaa = Any Amino Acid
CCEFACXNPACTGXXXA

SEQ ID NO: 13471 - protein, 14 aa, Artificial Sequence
  Synthetically generated peptide
  VARIANT (1)..(14): Xaa = Any Amino Acid
CCEFACNXPACTGA

SEQ ID NO: 13472 - protein, 15 aa, Artificial Sequence
  Synthetically generated peptide
  VARIANT (1)..(15): Xaa = Any Amino Acid
CCEFACNXXPACTGA

SEQ ID NO: 13473 - protein, 16 aa, Artificial Sequence
  Synthetically generated peptide
  VARIANT (1)..(16): Xaa = Any Amino Acid
CCEFACNXXXPACTGA

SEQ ID NO: 13474 - protein, 17 aa, Artificial Sequence
  Synthetically generated peptide
  VARIANT (1)..(17): Xaa = Any Amino Acid
CCEFACNXXXXPACTGA

SEQ ID NO: 13475 - protein, 17 aa, Artificial Sequence
  Synthetically generated peptide
  VARIANT (1)..(17): Xaa = Any Amino Acid
CCEFACNXXXPXACTGA

SEQ ID NO: 13476 - protein, 17 aa, Artificial Sequence
  Synthetically generated peptide
  VARIANT (1)..(17): Xaa = Any Amino Acid
CCEFACNXXXPAXCTGA

SEQ ID NO: 13477 - protein, 17 aa, Artificial Sequence
  Synthetically generated peptide
  VARIANT (1)..(17): Xaa = Any Amino Acid
CCEFACNXXXPACXTGA

SEQ ID NO: 13478 - protein, 17 aa, Artificial Sequence
  Synthetically generated peptide
  VARIANT (1)..(17): Xaa = Any Amino Acid
CCEFACNXXXPACTXGA

SEQ ID NO: 13479 - protein, 17 aa, Artificial Sequence
  Synthetically generated peptide
  VARIANT (1)..(17): Xaa = Any Amino Acid
CCEFACNXXXPACTGXA

SEQ ID NO: 13480 - protein, 16 aa, Artificial Sequence
  Synthetically generated peptide
  VARIANT (1)..(16): Xaa = Any Amino Acid
CCEFACNXXPXACTGA

SEQ ID NO: 13481 - protein, 17 aa, Artificial Sequence
  Synthetically generated peptide
  VARIANT (1)..(17): Xaa = Any Amino Acid
CCEFACNXXPXXACTGA

SEQ ID NO: 13482 - protein, 17 aa, Artificial Sequence
  Synthetically generated peptide
  VARIANT (1)..(17): Xaa = Any Amino Acid
CCEFACNXXPXAXCTGA

SEQ ID NO: 13483 - protein, 17 aa, Artificial Sequence
  Synthetically generated peptide
  VARIANT (1)..(17): Xaa = Any Amino Acid
CCEFACNXXPXACXTGA

SEQ ID NO: 13484 - protein, 17 aa, Artificial Sequence
  Synthetically generated peptide
  VARIANT (1)..(17): Xaa = Any Amino Acid
CCEFACNXXPXACTXGA

SEQ ID NO: 13485 - protein, 17 aa, Artificial Sequence
  Synthetically generated peptide
  VARIANT (1)..(17): Xaa = Any Amino Acid
CCEFACNXXPXACTGXA

SEQ ID NO: 13486 - protein, 16 aa, Artificial Sequence
  Synthetically generated peptide
  VARIANT (1)..(16): Xaa = Any Amino Acid
CCEFACNXXPAXCTGA

SEQ ID NO: 13487 - protein, 17 aa, Artificial Sequence
  Synthetically generated peptide
  VARIANT (1)..(17): Xaa = Any Amino Acid
CCEFACNXXPAXXCTGA

SEQ ID NO: 13488 - protein, 17 aa, Artificial Sequence
  Synthetically generated peptide
  VARIANT (1)..(17): Xaa = Any Amino Acid
CCEFACNXXPAXCXTGA

SEQ ID NO: 13489 - protein, 17 aa, Artificial Sequence
  Synthetically generated peptide
  VARIANT (1)..(17): Xaa = Any Amino Acid
CCEFACNXXPAXCTXGA

SEQ ID NO: 13490 - protein, 17 aa, Artificial Sequence
  Synthetically generated peptide
  VARIANT (1)..(17): Xaa = Any Amino Acid
CCEFACNXXPAXCTGXA

SEQ ID NO: 13491 - protein, 16 aa, Artificial Sequence
  Synthetically generated peptide
  VARIANT (1)..(16): Xaa = Any Amino Acid
CCEFACNXXPACXTGA

SEQ ID NO: 13492 - protein, 17 aa, Artificial Sequence
  Synthetically generated peptide
  VARIANT (1)..(17): Xaa = Any Amino Acid
CCEFACNXXPACXXTGA

SEQ ID NO: 13493 - protein, 17 aa, Artificial Sequence
  Synthetically generated peptide
  VARIANT (1)..(17): Xaa = Any Amino Acid
CCEFACNXXPACXTXGA

SEQ ID NO: 13494 - protein, 17 aa, Artificial Sequence
  Synthetically generated peptide
  VARIANT (1)..(17): Xaa = Any Amino Acid
CCEFACNXXPACXTGXA

SEQ ID NO: 13495 - protein, 16 aa, Artificial Sequence
  Synthetically generated peptide
  VARIANT (1)..(16): Xaa = Any Amino Acid
CCEFACNXXPACTXGA

SEQ ID NO: 13496 - protein, 17 aa, Artificial Sequence
  Synthetically generated peptide
  VARIANT (1)..(17): Xaa = Any Amino Acid
CCEFACNXXPACTXXGA

SEQ ID NO: 13497 - protein, 17 aa, Artificial Sequence
  Synthetically generated peptide
  VARIANT (1)..(17): Xaa = Any Amino Acid
CCEFACNXXPACTXGXA

SEQ ID NO: 13498 - protein, 16 aa, Artificial Sequence
  Synthetically generated peptide
  VARIANT (1)..(16): Xaa = Any Amino Acid
CCEFACNXXPACTGXA

SEQ ID NO: 13499 - protein, 17 aa, Artificial Sequence
  Synthetically generated peptide
  VARIANT (1)..(17): Xaa = Any Amino Acid
CCEFACNXXPACTGXXA

SEQ ID NO: 13500 - protein, 15 aa, Artificial Sequence
  Synthetically generated peptide
  VARIANT (1)..(15): Xaa = Any Amino Acid
CCEFACNXPXACTGA

SEQ ID NO: 13501 - protein, 16 aa, Artificial Sequence
  Synthetically generated peptide
  VARIANT (1)..(16): Xaa = Any Amino Acid
CCEFACNXPXXACTGA

SEQ ID NO: 13502 - protein, 17 aa, Artificial Sequence
  Synthetically generated peptide
  VARIANT (1)..(17): Xaa = Any Amino Acid
CCEFACNXPXXXACTGA

SEQ ID NO: 13503 - protein, 17 aa, Artificial Sequence
  Synthetically generated peptide
  VARIANT (1)..(17): Xaa = Any Amino Acid
CCEFACNXPXXAXCTGA

SEQ ID NO: 13504 - protein, 17 aa, Artificial Sequence
  Synthetically generated peptide
  VARIANT (1)..(17): Xaa = Any Amino Acid
CCEFACNXPXXACXTGA

SEQ ID NO: 13505 - protein, 17 aa, Artificial Sequence
  Synthetically generated peptide
  VARIANT (1)..(17): Xaa = Any Amino Acid
CCEFACNXPXXACTXGA

SEQ ID NO: 13506 - protein, 17 aa, Artificial Sequence
  Synthetically generated peptide
  VARIANT (1)..(17): Xaa = Any Amino Acid
CCEFACNXPXXACTGXA

SEQ ID NO: 13507 - protein, 16 aa, Artificial Sequence
  Synthetically generated peptide
  VARIANT (1)..(16): Xaa = Any Amino Acid
CCEFACNXPXAXCTGA

SEQ ID NO: 13508 - protein, 17 aa, Artificial Sequence
  Synthetically generated peptide
  VARIANT (1)..(17): Xaa = Any Amino Acid
CCEFACNXPXAXXCTGA

SEQ ID NO: 13509 - protein, 17 aa, Artificial Sequence
  Synthetically generated peptide
  VARIANT (1)..(17): Xaa = Any Amino Acid
CCEFACNXPXAXCXTGA

SEQ ID NO: 13510 - protein, 17 aa, Artificial Sequence
  Synthetically generated peptide
  VARIANT (1)..(17): Xaa = Any Amino Acid
CCEFACNXPXAXCTXGA

SEQ ID NO: 13511 - protein, 17 aa, Artificial Sequence
  Synthetically generated peptide
  VARIANT (1)..(17): Xaa = Any Amino Acid
CCEFACNXPXAXCTGXA

SEQ ID NO: 13512 - protein, 16 aa, Artificial Sequence
  Synthetically generated peptide
  VARIANT (1)..(16): Xaa = Any Amino Acid
CCEFACNXPXACXTGA

SEQ ID NO: 13513 - protein, 17 aa, Artificial Sequence
  Synthetically generated peptide
  VARIANT (1)..(17): Xaa = Any Amino Acid
CCEFACNXPXACXXTGA

SEQ ID NO: 13514 - protein, 17 aa, Artificial Sequence
  Synthetically generated peptide
  VARIANT (1)..(17): Xaa = Any Amino Acid
CCEFACNXPXACXTXGA

SEQ ID NO: 13515 - protein, 17 aa, Artificial Sequence
  Synthetically generated peptide
  VARIANT (1)..(17): Xaa = Any Amino Acid
CCEFACNXPXACXTGXA

SEQ ID NO: 13516 - protein, 16 aa, Artificial Sequence
  Synthetically generated peptide
  VARIANT (1)..(16): Xaa = Any Amino Acid
CCEFACNXPXACTXGA

SEQ ID NO: 13517 - protein, 17 aa, Artificial Sequence
  Synthetically generated peptide
  VARIANT (1)..(17): Xaa = Any Amino Acid
CCEFACNXPXACTXXGA

SEQ ID NO: 13518 - protein, 17 aa, Artificial Sequence
  Synthetically generated peptide
  VARIANT (1)..(17): Xaa = Any Amino Acid
CCEFACNXPXACTXGXA

SEQ ID NO: 13519 - protein, 16 aa, Artificial Sequence
  Synthetically generated peptide
  VARIANT (1)..(16): Xaa = Any Amino Acid
CCEFACNXPXACTGXA

SEQ ID NO: 13520 - protein, 17 aa, Artificial Sequence
  Synthetically generated peptide
  VARIANT (1)..(17): Xaa = Any Amino Acid
CCEFACNXPXACTGXXA

SEQ ID NO: 13521 - protein, 15 aa, Artificial Sequence
  Synthetically generated peptide
  VARIANT (1)..(15): Xaa = Any Amino Acid
CCEFACNXPAXCTGA

SEQ ID NO: 13522 - protein, 16 aa, Artificial Sequence
  Synthetically generated peptide
  VARIANT (1)..(16): Xaa = Any Amino Acid
CCEFACNXPAXXCTGA

SEQ ID NO: 13523 - protein, 17 aa, Artificial Sequence
  Synthetically generated peptide
  VARIANT (1)..(17): Xaa = Any Amino Acid
CCEFACNXPAXXXCTGA

SEQ ID NO: 13524 - protein, 17 aa, Artificial Sequence
  Synthetically generated peptide
  VARIANT (1)..(17): Xaa = Any Amino Acid
CCEFACNXPAXXCXTGA

SEQ ID NO: 13525 - protein, 17 aa, Artificial Sequence
  Synthetically generated peptide
  VARIANT (1)..(17): Xaa = Any Amino Acid
CCEFACNXPAXXCTXGA

SEQ ID NO: 13526 - protein, 17 aa, Artificial Sequence
  Synthetically generated peptide
  VARIANT (1)..(17): Xaa = Any Amino Acid
CCEFACNXPAXXCTGXA

SEQ ID NO: 13527 - protein, 16 aa, Artificial Sequence
  Synthetically generated peptide
  VARIANT (1)..(16): Xaa = Any Amino Acid
CCEFACNXPAXCXTGA

SEQ ID NO: 13528 - protein, 17 aa, Artificial Sequence
  Synthetically generated peptide
  VARIANT (1)..(17): Xaa = Any Amino Acid
CCEFACNXPAXCXXTGA

SEQ ID NO: 13529 - protein, 17 aa, Artificial Sequence
  Synthetically generated peptide
  VARIANT (1)..(17): Xaa = Any Amino Acid
CCEFACNXPAXCXTXGA

SEQ ID NO: 13530 - protein, 17 aa, Artificial Sequence
  Synthetically generated peptide
  VARIANT (1)..(17): Xaa = Any Amino Acid
CCEFACNXPAXCXTGXA

SEQ ID NO: 13531 - protein, 16 aa, Artificial Sequence
  Synthetically generated peptide
  VARIANT (1)..(16): Xaa = Any Amino Acid
CCEFACNXPAXCTXGA

SEQ ID NO: 13532 - protein, 17 aa, Artificial Sequence
  Synthetically generated peptide
  VARIANT (1)..(17): Xaa = Any Amino Acid
CCEFACNXPAXCTXXGA

SEQ ID NO: 13533 - protein, 17 aa, Artificial Sequence
  Synthetically generated peptide
  VARIANT (1)..(17): Xaa = Any Amino Acid
CCEFACNXPAXCTXGXA

SEQ ID NO: 13534 - protein, 16 aa, Artificial Sequence
  Synthetically generated peptide
  VARIANT (1)..(16): Xaa = Any Amino Acid
CCEFACNXPAXCTGXA

SEQ ID NO: 13535 - protein, 17 aa, Artificial Sequence
  Synthetically generated peptide
  VARIANT (1)..(17): Xaa = Any Amino Acid
CCEFACNXPAXCTGXXA

SEQ ID NO: 13536 - protein, 15 aa, Artificial Sequence
  Synthetically generated peptide
  VARIANT (1)..(15): Xaa = Any Amino Acid
CCEFACNXPACXTGA

SEQ ID NO: 13537 - protein, 16 aa, Artificial Sequence
  Synthetically generated peptide
  VARIANT (1)..(16): Xaa = Any Amino Acid
CCEFACNXPACXXTGA

SEQ ID NO: 13538 - protein, 17 aa, Artificial Sequence
  Synthetically generated peptide
  VARIANT (1)..(17): Xaa = Any Amino Acid
CCEFACNXPACXXXTGA

SEQ ID NO: 13539 - protein, 17 aa, Artificial Sequence
  Synthetically generated peptide
  VARIANT (1)..(17): Xaa = Any Amino Acid
CCEFACNXPACXXTXGA

SEQ ID NO: 13540 - protein, 17 aa, Artificial Sequence
  Synthetically generated peptide
  VARIANT (1)..(17): Xaa = Any Amino Acid
CCEFACNXPACXXTGXA

SEQ ID NO: 13541 - protein, 16 aa, Artificial Sequence
  Synthetically generated peptide
  VARIANT (1)..(16): Xaa = Any Amino Acid
CCEFACNXPACXTXGA

SEQ ID NO: 13542 - protein, 17 aa, Artificial Sequence
  Synthetically generated peptide
  VARIANT (1)..(17): Xaa = Any Amino Acid
CCEFACNXPACXTXXGA

SEQ ID NO: 13543 - protein, 17 aa, Artificial Sequence
  Synthetically generated peptide
  VARIANT (1)..(17): Xaa = Any Amino Acid
CCEFACNXPACXTXGXA

SEQ ID NO: 13544 - protein, 16 aa, Artificial Sequence
  Synthetically generated peptide
  VARIANT (1)..(16): Xaa = Any Amino Acid
CCEFACNXPACXTGXA

SEQ ID NO: 13545 - protein, 17 aa, Artificial Sequence
  Synthetically generated peptide
  VARIANT (1)..(17): Xaa = Any Amino Acid
CCEFACNXPACXTGXXA

SEQ ID NO: 13546 - protein, 15 aa, Artificial Sequence
  Synthetically generated peptide
  VARIANT (1)..(15): Xaa = Any Amino Acid
CCEFACNXPACTXGA

SEQ ID NO: 13547 - protein, 16 aa, Artificial Sequence
  Synthetically generated peptide
  VARIANT (1)..(16): Xaa = Any Amino Acid
CCEFACNXPACTXXGA

SEQ ID NO: 13548 - protein, 17 aa, Artificial Sequence
  Synthetically generated peptide
  VARIANT (1)..(17): Xaa = Any Amino Acid
CCEFACNXPACTXXXGA

SEQ ID NO: 13549 - protein, 17 aa, Artificial Sequence
  Synthetically generated peptide
  VARIANT (1)..(17): Xaa = Any Amino Acid
CCEFACNXPACTXXGXA

SEQ ID NO: 13550 - protein, 16 aa, Artificial Sequence
  Synthetically generated peptide
  VARIANT (1)..(16): Xaa = Any Amino Acid
CCEFACNXPACTXGXA

SEQ ID NO: 13551 - protein, 17 aa, Artificial Sequence
  Synthetically generated peptide
  VARIANT (1)..(17): Xaa = Any Amino Acid
CCEFACNXPACTXGXXA

SEQ ID NO: 13552 - protein, 15 aa, Artificial Sequence
  Synthetically generated peptide
  VARIANT (1)..(15): Xaa = Any Amino Acid
CCEFACNXPACTGXA

SEQ ID NO: 13553 - protein, 16 aa, Artificial Sequence
  Synthetically generated peptide
  VARIANT (1)..(16): Xaa = Any Amino Acid
CCEFACNXPACTGXXA

SEQ ID NO: 13554 - protein, 17 aa, Artificial Sequence
  Synthetically generated peptide
  VARIANT (1)..(17): Xaa = Any Amino Acid
CCEFACNXPACTGXXXA

SEQ ID NO: 13555 - protein, 14 aa, Artificial Sequence
  Synthetically generated peptide
  VARIANT (1)..(14): Xaa = Any Amino Acid
CCEFACNPXACTGA

SEQ ID NO: 13556 - protein, 15 aa, Artificial Sequence
  Synthetically generated peptide
  VARIANT (1)..(15): Xaa = Any Amino Acid
CCEFACNPXXACTGA

SEQ ID NO: 13557 - protein, 16 aa, Artificial Sequence
  Synthetically generated peptide
  VARIANT (1)..(16): Xaa = Any Amino Acid
CCEFACNPXXXACTGA

SEQ ID NO: 13558 - protein, 17 aa, Artificial Sequence
  Synthetically generated peptide
  VARIANT (1)..(17): Xaa = Any Amino Acid
CCEFACNPXXXXACTGA

SEQ ID NO: 13559 - protein, 17 aa, Artificial Sequence
  Synthetically generated peptide
  VARIANT (1)..(17): Xaa = Any Amino Acid
CCEFACNPXXXAXCTGA

SEQ ID NO: 13560 - protein, 17 aa, Artificial Sequence
  Synthetically generated peptide
  VARIANT (1)..(17): Xaa = Any Amino Acid
CCEFACNPXXXACXTGA

SEQ ID NO: 13561 - protein, 17 aa, Artificial Sequence
  Synthetically generated peptide
  VARIANT (1)..(17): Xaa = Any Amino Acid
CCEFACNPXXXACTXGA

SEQ ID NO: 13562 - protein, 17 aa, Artificial Sequence
  Synthetically generated peptide
  VARIANT (1)..(17): Xaa = Any Amino Acid
CCEFACNPXXXACTGXA

SEQ ID NO: 13563 - protein, 16 aa, Artificial Sequence
  Synthetically generated peptide
  VARIANT (1)..(16): Xaa = Any Amino Acid
CCEFACNPXXAXCTGA

SEQ ID NO: 13564 - protein, 17 aa, Artificial Sequence
  Synthetically generated peptide
  VARIANT (1)..(17): Xaa = Any Amino Acid
CCEFACNPXXAXXCTGA

SEQ ID NO: 13565 - protein, 17 aa, Artificial Sequence
  Synthetically generated peptide
  VARIANT (1)..(17): Xaa = Any Amino Acid
CCEFACNPXXAXCXTGA

SEQ ID NO: 13566 - protein, 17 aa, Artificial Sequence
  Synthetically generated peptide
  VARIANT (1)..(17): Xaa = Any Amino Acid
CCEFACNPXXAXCTXGA

SEQ ID NO: 13567 - protein, 17 aa, Artificial Sequence
  Synthetically generated peptide
  VARIANT (1)..(17): Xaa = Any Amino Acid
CCEFACNPXXAXCTGXA

SEQ ID NO: 13568 - protein, 16 aa, Artificial Sequence
  Synthetically generated peptide
  VARIANT (1)..(16): Xaa = Any Amino Acid
CCEFACNPXXACXTGA

SEQ ID NO: 13569 - protein, 17 aa, Artificial Sequence
  Synthetically generated peptide
  VARIANT (1)..(17): Xaa = Any Amino Acid
CCEFACNPXXACXXTGA

SEQ ID NO: 13570 - protein, 17 aa, Artificial Sequence
  Synthetically generated peptide
  VARIANT (1)..(17): Xaa = Any Amino Acid
CCEFACNPXXACXTXGA

SEQ ID NO: 13571 - protein, 17 aa, Artificial Sequence
  Synthetically generated peptide
  VARIANT (1)..(17): Xaa = Any Amino Acid
CCEFACNPXXACXTGXA

SEQ ID NO: 13572 - protein, 16 aa, Artificial Sequence
  Synthetically generated peptide
  VARIANT (1)..(16): Xaa = Any Amino Acid
CCEFACNPXXACTXGA

SEQ ID NO: 13573 - protein, 17 aa, Artificial Sequence
  Synthetically generated peptide
  VARIANT (1)..(17): Xaa = Any Amino Acid
CCEFACNPXXACTXXGA

SEQ ID NO: 13574 - protein, 17 aa, Artificial Sequence
  Synthetically generated peptide
  VARIANT (1)..(17): Xaa = Any Amino Acid
CCEFACNPXXACTXGXA

SEQ ID NO: 13575 - protein, 16 aa, Artificial Sequence
  Synthetically generated peptide
  VARIANT (1)..(16): Xaa = Any Amino Acid
CCEFACNPXXACTGXA

SEQ ID NO: 13576 - protein, 17 aa, Artificial Sequence
  Synthetically generated peptide
  VARIANT (1)..(17): Xaa = Any Amino Acid
CCEFACNPXXACTGXXA

SEQ ID NO: 13577 - protein, 15 aa, Artificial Sequence
  Synthetically generated peptide
  VARIANT (1)..(15): Xaa = Any Amino Acid
CCEFACNPXAXCTGA

SEQ ID NO: 13578 - protein, 16 aa, Artificial Sequence
  Synthetically generated peptide
  VARIANT (1)..(16): Xaa = Any Amino Acid
CCEFACNPXAXXCTGA

SEQ ID NO: 13579 - protein, 17 aa, Artificial Sequence
  Synthetically generated peptide
  VARIANT (1)..(17): Xaa = Any Amino Acid
CCEFACNPXAXXXCTGA

SEQ ID NO: 13580 - protein, 17 aa, Artificial Sequence
  Synthetically generated peptide
  VARIANT (1)..(17): Xaa = Any Amino Acid
CCEFACNPXAXXCXTGA

SEQ ID NO: 13581 - protein, 17 aa, Artificial Sequence
  Synthetically generated peptide
  VARIANT (1)..(17): Xaa = Any Amino Acid
CCEFACNPXAXXCTXGA

SEQ ID NO: 13582 - protein, 17 aa, Artificial Sequence
  Synthetically generated peptide
  VARIANT (1)..(17): Xaa = Any Amino Acid
CCEFACNPXAXXCTGXA

SEQ ID NO: 13583 - protein, 16 aa, Artificial Sequence
  Synthetically generated peptide
  VARIANT (1)..(16): Xaa = Any Amino Acid
CCEFACNPXAXCXTGA

SEQ ID NO: 13584 - protein, 17 aa, Artificial Sequence
  Synthetically generated peptide
  VARIANT (1)..(17): Xaa = Any Amino Acid
CCEFACNPXAXCXXTGA

SEQ ID NO: 13585 - protein, 17 aa, Artificial Sequence
  Synthetically generated peptide
  VARIANT (1)..(17): Xaa = Any Amino Acid
CCEFACNPXAXCXTXGA

SEQ ID NO: 13586 - protein, 17 aa, Artificial Sequence
  Synthetically generated peptide
  VARIANT (1)..(17): Xaa = Any Amino Acid
CCEFACNPXAXCXTGXA

SEQ ID NO: 13587 - protein, 16 aa, Artificial Sequence
  Synthetically generated peptide
  VARIANT (1)..(16): Xaa = Any Amino Acid
CCEFACNPXAXCTXGA

SEQ ID NO: 13588 - protein, 17 aa, Artificial Sequence
  Synthetically generated peptide
  VARIANT (1)..(17): Xaa = Any Amino Acid
CCEFACNPXAXCTXXGA

SEQ ID NO: 13589 - protein, 17 aa, Artificial Sequence
  Synthetically generated peptide
  VARIANT (1)..(17): Xaa = Any Amino Acid
CCEFACNPXAXCTXGXA

SEQ ID NO: 13590 - protein, 16 aa, Artificial Sequence
  Synthetically generated peptide
  VARIANT (1)..(16): Xaa = Any Amino Acid
CCEFACNPXAXCTGXA

SEQ ID NO: 13591 - protein, 17 aa, Artificial Sequence
  Synthetically generated peptide
  VARIANT (1)..(17): Xaa = Any Amino Acid
CCEFACNPXAXCTGXXA

SEQ ID NO: 13592 - protein, 15 aa, Artificial Sequence
  Synthetically generated peptide
  VARIANT (1)..(15): Xaa = Any Amino Acid
CCEFACNPXACXTGA

SEQ ID NO: 13593 - protein, 16 aa, Artificial Sequence
  Synthetically generated peptide
  VARIANT (1)..(16): Xaa = Any Amino Acid
CCEFACNPXACXXTGA

SEQ ID NO: 13594 - protein, 17 aa, Artificial Sequence
  Synthetically generated peptide
  VARIANT (1)..(17): Xaa = Any Amino Acid
CCEFACNPXACXXXTGA

SEQ ID NO: 13595 - protein, 17 aa, Artificial Sequence
  Synthetically generated peptide
  VARIANT (1)..(17): Xaa = Any Amino Acid
CCEFACNPXACXXTXGA

SEQ ID NO: 13596 - protein, 17 aa, Artificial Sequence
  Synthetically generated peptide
  VARIANT (1)..(17): Xaa = Any Amino Acid
CCEFACNPXACXXTGXA

SEQ ID NO: 13597 - protein, 16 aa, Artificial Sequence
  Synthetically generated peptide
  VARIANT (1)..(16): Xaa = Any Amino Acid
CCEFACNPXACXTXGA

SEQ ID NO: 13598 - protein, 17 aa, Artificial Sequence
  Synthetically generated peptide
  VARIANT (1)..(17): Xaa = Any Amino Acid
CCEFACNPXACXTXXGA

SEQ ID NO: 13599 - protein, 17 aa, Artificial Sequence
  Synthetically generated peptide
  VARIANT (1)..(17): Xaa = Any Amino Acid
CCEFACNPXACXTXGXA

SEQ ID NO: 13600 - protein, 16 aa, Artificial Sequence
  Synthetically generated peptide
  VARIANT (1)..(16): Xaa = Any Amino Acid
CCEFACNPXACXTGXA

SEQ ID NO: 13601 - protein, 17 aa, Artificial Sequence
  Synthetically generated peptide
  VARIANT (1)..(17): Xaa = Any Amino Acid
CCEFACNPXACXTGXXA

SEQ ID NO: 13602 - protein, 15 aa, Artificial Sequence
  Synthetically generated peptide
  VARIANT (1)..(15): Xaa = Any Amino Acid
CCEFACNPXACTXGA

SEQ ID NO: 13603 - protein, 16 aa, Artificial Sequence
  Synthetically generated peptide
  VARIANT (1)..(16): Xaa = Any Amino Acid
CCEFACNPXACTXXGA

SEQ ID NO: 13604 - protein, 17 aa, Artificial Sequence
  Synthetically generated peptide
  VARIANT (1)..(17): Xaa = Any Amino Acid
CCEFACNPXACTXXXGA

SEQ ID NO: 13605 - protein, 17 aa, Artificial Sequence
  Synthetically generated peptide
  VARIANT (1)..(17): Xaa = Any Amino Acid
CCEFACNPXACTXXGXA

SEQ ID NO: 13606 - protein, 16 aa, Artificial Sequence
  Synthetically generated peptide
  VARIANT (1)..(16): Xaa = Any Amino Acid
CCEFACNPXACTXGXA

SEQ ID NO: 13607 - protein, 17 aa, Artificial Sequence
  Synthetically generated peptide
  VARIANT (1)..(17): Xaa = Any Amino Acid
CCEFACNPXACTXGXXA

SEQ ID NO: 13608 - protein, 15 aa, Artificial Sequence
  Synthetically generated peptide
  VARIANT (1)..(15): Xaa = Any Amino Acid
CCEFACNPXACTGXA

SEQ ID NO: 13609 - protein, 16 aa, Artificial Sequence
  Synthetically generated peptide
  VARIANT (1)..(16): Xaa = Any Amino Acid
CCEFACNPXACTGXXA

SEQ ID NO: 13610 - protein, 17 aa, Artificial Sequence
  Synthetically generated peptide
  VARIANT (1)..(17): Xaa = Any Amino Acid
CCEFACNPXACTGXXXA

SEQ ID NO: 13611 - protein, 14 aa, Artificial Sequence
  Synthetically generated peptide
  VARIANT (1)..(14): Xaa = Any Amino Acid
CCEFACNPAXCTGA

SEQ ID NO: 13612 - protein, 15 aa, Artificial Sequence
  Synthetically generated peptide
  VARIANT (1)..(15): Xaa = Any Amino Acid
CCEFACNPAXXCTGA

SEQ ID NO: 13613 - protein, 16 aa, Artificial Sequence
  Synthetically generated peptide
  VARIANT (1)..(16): Xaa = Any Amino Acid
CCEFACNPAXXXCTGA

SEQ ID NO: 13614 - protein, 17 aa, Artificial Sequence
  Synthetically generated peptide
  VARIANT (1)..(17): Xaa = Any Amino Acid
CCEFACNPAXXXXCTGA

SEQ ID NO: 13615 - protein, 17 aa, Artificial Sequence
  Synthetically generated peptide
  VARIANT (1)..(17): Xaa = Any Amino Acid
CCEFACNPAXXXCXTGA

SEQ ID NO: 13616 - protein, 17 aa, Artificial Sequence
  Synthetically generated peptide
  VARIANT (1)..(17): Xaa = Any Amino Acid
CCEFACNPAXXXCTXGA

SEQ ID NO: 13617 - protein, 17 aa, Artificial Sequence
  Synthetically generated peptide
  VARIANT (1)..(17): Xaa = Any Amino Acid
CCEFACNPAXXXCTGXA

SEQ ID NO: 13618 - protein, 16 aa, Artificial Sequence
  Synthetically generated peptide
  VARIANT (1)..(16): Xaa = Any Amino Acid
CCEFACNPAXXCXTGA

SEQ ID NO: 13619 - protein, 17 aa, Artificial Sequence
  Synthetically generated peptide
  VARIANT (1)..(17): Xaa = Any Amino Acid
CCEFACNPAXXCXXTGA

SEQ ID NO: 13620 - protein, 17 aa, Artificial Sequence
  Synthetically generated peptide
  VARIANT (1)..(17): Xaa = Any Amino Acid
CCEFACNPAXXCXTXGA

SEQ ID NO: 13621 - protein, 17 aa, Artificial Sequence
  Synthetically generated peptide
  VARIANT (1)..(17): Xaa = Any Amino Acid
CCEFACNPAXXCXTGXA

SEQ ID NO: 13622 - protein, 16 aa, Artificial Sequence
  Synthetically generated peptide
  VARIANT (1)..(16): Xaa = Any Amino Acid
CCEFACNPAXXCTXGA

SEQ ID NO: 13623 - protein, 17 aa, Artificial Sequence
  Synthetically generated peptide
  VARIANT (1)..(17): Xaa = Any Amino Acid
CCEFACNPAXXCTXXGA

SEQ ID NO: 13624 - protein, 17 aa, Artificial Sequence
  Synthetically generated peptide
  VARIANT (1)..(17): Xaa = Any Amino Acid
CCEFACNPAXXCTXGXA

SEQ ID NO: 13625 - protein, 16 aa, Artificial Sequence
  Synthetically generated peptide
  VARIANT (1)..(16): Xaa = Any Amino Acid
CCEFACNPAXXCTGXA

SEQ ID NO: 13626 - protein, 17 aa, Artificial Sequence
  Synthetically generated peptide
  VARIANT (1)..(17): Xaa = Any Amino Acid
CCEFACNPAXXCTGXXA

SEQ ID NO: 13627 - protein, 15 aa, Artificial Sequence
  Synthetically generated peptide
  VARIANT (1)..(15): Xaa = Any Amino Acid
CCEFACNPAXCXTGA

SEQ ID NO: 13628 - protein, 16 aa, Artificial Sequence
  Synthetically generated peptide
  VARIANT (1)..(16): Xaa = Any Amino Acid
CCEFACNPAXCXXTGA

SEQ ID NO: 13629 - protein, 17 aa, Artificial Sequence
  Synthetically generated peptide
  VARIANT (1)..(17): Xaa = Any Amino Acid
CCEFACNPAXCXXXTGA

SEQ ID NO: 13630 - protein, 17 aa, Artificial Sequence
  Synthetically generated peptide
  VARIANT (1)..(17): Xaa = Any Amino Acid
CCEFACNPAXCXXTXGA

SEQ ID NO: 13631 - protein, 17 aa, Artificial Sequence
  Synthetically generated peptide
  VARIANT (1)..(17): Xaa = Any Amino Acid
CCEFACNPAXCXXTGXA

SEQ ID NO: 13632 - protein, 16 aa, Artificial Sequence
  Synthetically generated peptide
  VARIANT (1)..(16): Xaa = Any Amino Acid
CCEFACNPAXCXTXGA

SEQ ID NO: 13633 - protein, 17 aa, Artificial Sequence
  Synthetically generated peptide
  VARIANT (1)..(17): Xaa = Any Amino Acid
CCEFACNPAXCXTXXGA

SEQ ID NO: 13634 - protein, 17 aa, Artificial Sequence
  Synthetically generated peptide
  VARIANT (1)..(17): Xaa = Any Amino Acid
CCEFACNPAXCXTXGXA

SEQ ID NO: 13635 - protein, 16 aa, Artificial Sequence
  Synthetically generated peptide
  VARIANT (1)..(16): Xaa = Any Amino Acid
CCEFACNPAXCXTGXA

SEQ ID NO: 13636 - protein, 17 aa, Artificial Sequence
  Synthetically generated peptide
  VARIANT (1)..(17): Xaa = Any Amino Acid
CCEFACNPAXCXTGXXA

SEQ ID NO: 13637 - protein, 15 aa, Artificial Sequence
  Synthetically generated peptide
  VARIANT (1)..(15): Xaa = Any Amino Acid
CCEFACNPAXCTXGA

SEQ ID NO: 13638 - protein, 16 aa, Artificial Sequence
  Synthetically generated peptide
  VARIANT (1)..(16): Xaa = Any Amino Acid
CCEFACNPAXCTXXGA

SEQ ID NO: 13639 - protein, 17 aa, Artificial Sequence
  Synthetically generated peptide
  VARIANT (1)..(17): Xaa = Any Amino Acid
CCEFACNPAXCTXXXGA

SEQ ID NO: 13640 - protein, 17 aa, Artificial Sequence
  Synthetically generated peptide
  VARIANT (1)..(17): Xaa = Any Amino Acid
CCEFACNPAXCTXXGXA

SEQ ID NO: 13641 - protein, 16 aa, Artificial Sequence
  Synthetically generated peptide
  VARIANT (1)..(16): Xaa = Any Amino Acid
CCEFACNPAXCTXGXA

SEQ ID NO: 13642 - protein, 17 aa, Artificial Sequence
  Synthetically generated peptide
  VARIANT (1)..(17): Xaa = Any Amino Acid
CCEFACNPAXCTXGXXA

SEQ ID NO: 13643 - protein, 15 aa, Artificial Sequence
  Synthetically generated peptide
  VARIANT (1)..(15): Xaa = Any Amino Acid
CCEFACNPAXCTGXA

SEQ ID NO: 13644 - protein, 16 aa, Artificial Sequence
  Synthetically generated peptide
  VARIANT (1)..(16): Xaa = Any Amino Acid
CCEFACNPAXCTGXXA

SEQ ID NO: 13645 - protein, 17 aa, Artificial Sequence
  Synthetically generated peptide
  VARIANT (1)..(17): Xaa = Any Amino Acid
CCEFACNPAXCTGXXXA

SEQ ID NO: 13646 - protein, 14 aa, Artificial Sequence
  Synthetically generated peptide
  VARIANT (1)..(14): Xaa = Any Amino Acid
CCEFACNPACXTGA

SEQ ID NO: 13647 - protein, 15 aa, Artificial Sequence
  Synthetically generated peptide
  VARIANT (1)..(15): Xaa = Any Amino Acid
CCEFACNPACXXTGA

SEQ ID NO: 13648 - protein, 16 aa, Artificial Sequence
  Synthetically generated peptide
  VARIANT (1)..(16): Xaa = Any Amino Acid
CCEFACNPACXXXTGA

SEQ ID NO: 13649 - protein, 17 aa, Artificial Sequence
  Synthetically generated peptide
  VARIANT (1)..(17): Xaa = Any Amino Acid
CCEFACNPACXXXXTGA

SEQ ID NO: 13650 - protein, 17 aa, Artificial Sequence
  Synthetically generated peptide
  VARIANT (1)..(17): Xaa = Any Amino Acid
CCEFACNPACXXXTXGA

SEQ ID NO: 13651 - protein, 17 aa, Artificial Sequence
  Synthetically generated peptide
  VARIANT (1)..(17): Xaa = Any Amino Acid
CCEFACNPACXXXTGXA

SEQ ID NO: 13652 - protein, 16 aa, Artificial Sequence
  Synthetically generated peptide
  VARIANT (1)..(16): Xaa = Any Amino Acid
CCEFACNPACXXTXGA

SEQ ID NO: 13653 - protein, 17 aa, Artificial Sequence
  Synthetically generated peptide
  VARIANT (1)..(17): Xaa = Any Amino Acid
CCEFACNPACXXTXXGA

SEQ ID NO: 13654 - protein, 17 aa, Artificial Sequence
  Synthetically generated peptide
  VARIANT (1)..(17): Xaa = Any Amino Acid
CCEFACNPACXXTXGXA

SEQ ID NO: 13655 - protein, 16 aa, Artificial Sequence
  Synthetically generated peptide
  VARIANT (1)..(16): Xaa = Any Amino Acid
CCEFACNPACXXTGXA

SEQ ID NO: 13656 - protein, 17 aa, Artificial Sequence
  Synthetically generated peptide
  VARIANT (1)..(17): Xaa = Any Amino Acid
CCEFACNPACXXTGXXA

SEQ ID NO: 13657 - protein, 15 aa, Artificial Sequence
  Synthetically generated peptide
  VARIANT (1)..(15): Xaa = Any Amino Acid
CCEFACNPACXTXGA

SEQ ID NO: 13658 - protein, 16 aa, Artificial Sequence
  Synthetically generated peptide
  VARIANT (1)..(16): Xaa = Any Amino Acid
CCEFACNPACXTXXGA

SEQ ID NO: 13659 - protein, 17 aa, Artificial Sequence
  Synthetically generated peptide
  VARIANT (1)..(17): Xaa = Any Amino Acid
CCEFACNPACXTXXXGA

SEQ ID NO: 13660 - protein, 17 aa, Artificial Sequence
  Synthetically generated peptide
  VARIANT (1)..(17): Xaa = Any Amino Acid
CCEFACNPACXTXXGXA

SEQ ID NO: 13661 - protein, 16 aa, Artificial Sequence
  Synthetically generated peptide
  VARIANT (1)..(16): Xaa = Any Amino Acid
CCEFACNPACXTXGXA

SEQ ID NO: 13662 - protein, 17 aa, Artificial Sequence
  Synthetically generated peptide
  VARIANT (1)..(17): Xaa = Any Amino Acid
CCEFACNPACXTXGXXA

SEQ ID NO: 13663 - protein, 15 aa, Artificial Sequence
  Synthetically generated peptide
  VARIANT (1)..(15): Xaa = Any Amino Acid
CCEFACNPACXTGXA

SEQ ID NO: 13664 - protein, 16 aa, Artificial Sequence
  Synthetically generated peptide
  VARIANT (1)..(16): Xaa = Any Amino Acid
CCEFACNPACXTGXXA

SEQ ID NO: 13665 - protein, 17 aa, Artificial Sequence
  Synthetically generated peptide
  VARIANT (1)..(17): Xaa = Any Amino Acid
CCEFACNPACXTGXXXA

SEQ ID NO: 13666 - protein, 14 aa, Artificial Sequence
  Synthetically generated peptide
  VARIANT (1)..(14): Xaa = Any Amino Acid
CCEFACNPACTXGA

SEQ ID NO: 13667 - protein, 15 aa, Artificial Sequence
  Synthetically generated peptide
  VARIANT (1)..(15): Xaa = Any Amino Acid
CCEFACNPACTXXGA

SEQ ID NO: 13668 - protein, 16 aa, Artificial Sequence
  Synthetically generated peptide
  VARIANT (1)..(16): Xaa = Any Amino Acid
CCEFACNPACTXXXGA

SEQ ID NO: 13669 - protein, 17 aa, Artificial Sequence
  Synthetically generated peptide
  VARIANT (1)..(17): Xaa = Any Amino Acid
CCEFACNPACTXXXXGA

SEQ ID NO: 13670 - protein, 17 aa, Artificial Sequence
  Synthetically generated peptide
  VARIANT (1)..(17): Xaa = Any Amino Acid
CCEFACNPACTXXXGXA

SEQ ID NO: 13671 - protein, 16 aa, Artificial Sequence
  Synthetically generated peptide
  VARIANT (1)..(16): Xaa = Any Amino Acid
CCEFACNPACTXXGXA

SEQ ID NO: 13672 - protein, 17 aa, Artificial Sequence
  Synthetically generated peptide
  VARIANT (1)..(17): Xaa = Any Amino Acid
CCEFACNPACTXXGXXA

SEQ ID NO: 13673 - protein, 15 aa, Artificial Sequence
  Synthetically generated peptide
  VARIANT (1)..(15): Xaa = Any Amino Acid
CCEFACNPACTXGXA

SEQ ID NO: 13674 - protein, 16 aa, Artificial Sequence
  Synthetically generated peptide
  VARIANT (1)..(16): Xaa = Any Amino Acid
CCEFACNPACTXGXXA

SEQ ID NO: 13675 - protein, 17 aa, Artificial Sequence
  Synthetically generated peptide
  VARIANT (1)..(17): Xaa = Any Amino Acid
CCEFACNPACTXGXXXA

SEQ ID NO: 13676 - protein, 14 aa, Artificial Sequence
  Synthetically generated peptide
  VARIANT (1)..(14): Xaa = Any Amino Acid
CCEFACNPACTGXA

SEQ ID NO: 13677 - protein, 15 aa, Artificial Sequence
  Synthetically generated peptide
  VARIANT (1)..(15): Xaa = Any Amino Acid
CCEFACNPACTGXXA

SEQ ID NO: 13678 - protein, 16 aa, Artificial Sequence
  Synthetically generated peptide
  VARIANT (1)..(16): Xaa = Any Amino Acid
CCEFACNPACTGXXXA

SEQ ID NO: 13679 - protein, 17 aa, Artificial Sequence
  Synthetically generated peptide
  VARIANT (1)..(17): Xaa = Any Amino Acid
CCEFACNPACTGXXXXA

SEQ ID NO: 13680 - protein, 14 aa, Artificial Sequence
  Synthetically generated peptide
  VARIANT (1)..(14): Xaa = Any Amino Acid
ACXEWCANPACTGC

SEQ ID NO: 13681 - protein, 15 aa, Artificial Sequence
  Synthetically generated peptide
  VARIANT (1)..(15): Xaa = Any Amino Acid
ACXXEWCANPACTGC

SEQ ID NO: 13682 - protein, 16 aa, Artificial Sequence
  Synthetically generated peptide
  VARIANT (1)..(16): Xaa = Any Amino Acid
ACXXXEWCANPACTGC

SEQ ID NO: 13683 - protein, 17 aa, Artificial Sequence
  Synthetically generated peptide
  VARIANT (1)..(17): Xaa = Any Amino Acid
ACXXXXEWCANPACTGC

SEQ ID NO: 13684 - protein, 17 aa, Artificial Sequence
  Synthetically generated peptide
  VARIANT (1)..(17): Xaa = Any Amino Acid
ACXXXEXWCANPACTGC

SEQ ID NO: 13685 - protein, 17 aa, Artificial Sequence
  Synthetically generated peptide
  VARIANT (1)..(17): Xaa = Any Amino Acid
ACXXXEWXCANPACTGC

SEQ ID NO: 13686 - protein, 17 aa, Artificial Sequence
  Synthetically generated peptide
  VARIANT (1)..(17): Xaa = Any Amino Acid
ACXXXEWCAXNPACTGC

SEQ ID NO: 13687 - protein, 17 aa, Artificial Sequence
  Synthetically generated peptide
  VARIANT (1)..(17): Xaa = Any Amino Acid
ACXXXEWCANXPACTGC

SEQ ID NO: 13688 - protein, 17 aa, Artificial Sequence
  Synthetically generated peptide
  VARIANT (1)..(17): Xaa = Any Amino Acid
ACXXXEWCANPXACTGC

SEQ ID NO: 13689 - protein, 17 aa, Artificial Sequence
  Synthetically generated peptide
  VARIANT (1)..(17): Xaa = Any Amino Acid
ACXXXEWCANPAXCTGC

SEQ ID NO: 13690 - protein, 17 aa, Artificial Sequence
  Synthetically generated peptide
  VARIANT (1)..(17): Xaa = Any Amino Acid
ACXXXEWCANPACXTGC

SEQ ID NO: 13691 - protein, 17 aa, Artificial Sequence
  Synthetically generated peptide
  VARIANT (1)..(17): Xaa = Any Amino Acid
ACXXXEWCANPACTXGC

SEQ ID NO: 13692 - protein, 17 aa, Artificial Sequence
  Synthetically generated peptide
  VARIANT (1)..(17): Xaa = Any Amino Acid
ACXXXEWCANPACTGXC

SEQ ID NO: 13693 - protein, 16 aa, Artificial Sequence
  Synthetically generated peptide
  VARIANT (1)..(16): Xaa = Any Amino Acid
ACXXEXWCANPACTGC

SEQ ID NO: 13694 - protein, 17 aa, Artificial Sequence
  Synthetically generated peptide
  VARIANT (1)..(17): Xaa = Any Amino Acid
ACXXEXXWCANPACTGC

SEQ ID NO: 13695 - protein, 17 aa, Artificial Sequence
  Synthetically generated peptide
  VARIANT (1)..(17): Xaa = Any Amino Acid
ACXXEXWXCANPACTGC

SEQ ID NO: 13696 - protein, 17 aa, Artificial Sequence
  Synthetically generated peptide
  VARIANT (1)..(17): Xaa = Any Amino Acid
ACXXEXWCAXNPACTGC

SEQ ID NO: 13697 - protein, 17 aa, Artificial Sequence
  Synthetically generated peptide
  VARIANT (1)..(17): Xaa = Any Amino Acid
ACXXEXWCANXPACTGC

SEQ ID NO: 13698 - protein, 17 aa, Artificial Sequence
  Synthetically generated peptide
  VARIANT (1)..(17): Xaa = Any Amino Acid
ACXXEXWCANPXACTGC

SEQ ID NO: 13699 - protein, 17 aa, Artificial Sequence
  Synthetically generated peptide
  VARIANT (1)..(17): Xaa = Any Amino Acid
ACXXEXWCANPAXCTGC

SEQ ID NO: 13700 - protein, 17 aa, Artificial Sequence
  Synthetically generated peptide
  VARIANT (1)..(17): Xaa = Any Amino Acid
ACXXEXWCANPACXTGC

SEQ ID NO: 13701 - protein, 17 aa, Artificial Sequence
  Synthetically generated peptide
  VARIANT (1)..(17): Xaa = Any Amino Acid
ACXXEXWCANPACTXGC

SEQ ID NO: 13702 - protein, 17 aa, Artificial Sequence
  Synthetically generated peptide
  VARIANT (1)..(17): Xaa = Any Amino Acid
ACXXEXWCANPACTGXC

SEQ ID NO: 13703 - protein, 16 aa, Artificial Sequence
  Synthetically generated peptide
  VARIANT (1)..(16): Xaa = Any Amino Acid
ACXXEWXCANPACTGC

SEQ ID NO: 13704 - protein, 17 aa, Artificial Sequence
  Synthetically generated peptide
  VARIANT (1)..(17): Xaa = Any Amino Acid
ACXXEWXXCANPACTGC

SEQ ID NO: 13705 - protein, 17 aa, Artificial Sequence
  Synthetically generated peptide
  VARIANT (1)..(17): Xaa = Any Amino Acid
ACXXEWXCAXNPACTGC

SEQ ID NO: 13706 - protein, 17 aa, Artificial Sequence
  Synthetically generated peptide
  VARIANT (1)..(17): Xaa = Any Amino Acid
ACXXEWXCANXPACTGC

SEQ ID NO: 13707 - protein, 17 aa, Artificial Sequence
  Synthetically generated peptide
  VARIANT (1)..(17): Xaa = Any Amino Acid
ACXXEWXCANPXACTGC

SEQ ID NO: 13708 - protein, 17 aa, Artificial Sequence
  Synthetically generated peptide
  VARIANT (1)..(17): Xaa = Any Amino Acid
ACXXEWXCANPAXCTGC

SEQ ID NO: 13709 - protein, 17 aa, Artificial Sequence
  Synthetically generated peptide
  VARIANT (1)..(17): Xaa = Any Amino Acid
ACXXEWXCANPACXTGC

SEQ ID NO: 13710 - protein, 17 aa, Artificial Sequence
  Synthetically generated peptide
  VARIANT (1)..(17): Xaa = Any Amino Acid
ACXXEWXCANPACTXGC

SEQ ID NO: 13711 - protein, 17 aa, Artificial Sequence
  Synthetically generated peptide
  VARIANT (1)..(17): Xaa = Any Amino Acid
ACXXEWXCANPACTGXC

SEQ ID NO: 13712 - protein, 16 aa, Artificial Sequence
  Synthetically generated peptide
  VARIANT (1)..(16): Xaa = Any Amino Acid
ACXXEWCAXNPACTGC

SEQ ID NO: 13713 - protein, 17 aa, Artificial Sequence
  Synthetically generated peptide
  VARIANT (1)..(17): Xaa = Any Amino Acid
ACXXEWCAXXNPACTGC

SEQ ID NO: 13714 - protein, 17 aa, Artificial Sequence
  Synthetically generated peptide
  VARIANT (1)..(17): Xaa = Any Amino Acid
ACXXEWCAXNXPACTGC

SEQ ID NO: 13715 - protein, 17 aa, Artificial Sequence
  Synthetically generated peptide
  VARIANT (1)..(17): Xaa = Any Amino Acid
ACXXEWCAXNPXACTGC

SEQ ID NO: 13716 - protein, 17 aa, Artificial Sequence
  Synthetically generated peptide
  VARIANT (1)..(17): Xaa = Any Amino Acid
ACXXEWCAXNPAXCTGC

SEQ ID NO: 13717 - protein, 17 aa, Artificial Sequence
  Synthetically generated peptide
  VARIANT (1)..(17): Xaa = Any Amino Acid
ACXXEWCAXNPACXTGC

SEQ ID NO: 13718 - protein, 17 aa, Artificial Sequence
  Synthetically generated peptide
  VARIANT (1)..(17): Xaa = Any Amino Acid
ACXXEWCAXNPACTXGC

SEQ ID NO: 13719 - protein, 17 aa, Artificial Sequence
  Synthetically generated peptide
  VARIANT (1)..(17): Xaa = Any Amino Acid
ACXXEWCAXNPACTGXC

SEQ ID NO: 13720 - protein, 16 aa, Artificial Sequence
  Synthetically generated peptide
  VARIANT (1)..(16): Xaa = Any Amino Acid
ACXXEWCANXPACTGC

SEQ ID NO: 13721 - protein, 17 aa, Artificial Sequence
  Synthetically generated peptide
  VARIANT (1)..(17): Xaa = Any Amino Acid
ACXXEWCANXXPACTGC

SEQ ID NO: 13722 - protein, 17 aa, Artificial Sequence
  Synthetically generated peptide
  VARIANT (1)..(17): Xaa = Any Amino Acid
ACXXEWCANXPXACTGC

SEQ ID NO: 13723 - protein, 17 aa, Artificial Sequence
  Synthetically generated peptide
  VARIANT (1)..(17): Xaa = Any Amino Acid
ACXXEWCANXPAXCTGC

SEQ ID NO: 13724 - protein, 17 aa, Artificial Sequence
  Synthetically generated peptide
  VARIANT (1)..(17): Xaa = Any Amino Acid
ACXXEWCANXPACXTGC

SEQ ID NO: 13725 - protein, 17 aa, Artificial Sequence
  Synthetically generated peptide
  VARIANT (1)..(17): Xaa = Any Amino Acid
ACXXEWCANXPACTXGC

SEQ ID NO: 13726 - protein, 17 aa, Artificial Sequence
  Synthetically generated peptide
  VARIANT (1)..(17): Xaa = Any Amino Acid
ACXXEWCANXPACTGXC

SEQ ID NO: 13727 - protein, 16 aa, Artificial Sequence
  Synthetically generated peptide
  VARIANT (1)..(16): Xaa = Any Amino Acid
ACXXEWCANPXACTGC

SEQ ID NO: 13728 - protein, 17 aa, Artificial Sequence
  Synthetically generated peptide
  VARIANT (1)..(17): Xaa = Any Amino Acid
ACXXEWCANPXXACTGC

SEQ ID NO: 13729 - protein, 17 aa, Artificial Sequence
  Synthetically generated peptide
  VARIANT (1)..(17): Xaa = Any Amino Acid
ACXXEWCANPXAXCTGC

SEQ ID NO: 13730 - protein, 17 aa, Artificial Sequence
  Synthetically generated peptide
  VARIANT (1)..(17): Xaa = Any Amino Acid
ACXXEWCANPXACXTGC

SEQ ID NO: 13731 - protein, 17 aa, Artificial Sequence
  Synthetically generated peptide
  VARIANT (1)..(17): Xaa = Any Amino Acid
ACXXEWCANPXACTXGC

SEQ ID NO: 13732 - protein, 17 aa, Artificial Sequence
  Synthetically generated peptide
  VARIANT (1)..(17): Xaa = Any Amino Acid
ACXXEWCANPXACTGXC

SEQ ID NO: 13733 - protein, 16 aa, Artificial Sequence
  Synthetically generated peptide
  VARIANT (1)..(16): Xaa = Any Amino Acid
ACXXEWCANPAXCTGC

SEQ ID NO: 13734 - protein, 17 aa, Artificial Sequence
  Synthetically generated peptide
  VARIANT (1)..(17): Xaa = Any Amino Acid
ACXXEWCANPAXXCTGC

SEQ ID NO: 13735 - protein, 17 aa, Artificial Sequence
  Synthetically generated peptide
  VARIANT (1)..(17): Xaa = Any Amino Acid
ACXXEWCANPAXCXTGC

SEQ ID NO: 13736 - protein, 17 aa, Artificial Sequence
  Synthetically generated peptide
  VARIANT (1)..(17): Xaa = Any Amino Acid
ACXXEWCANPAXCTXGC

SEQ ID NO: 13737 - protein, 17 aa, Artificial Sequence
  Synthetically generated peptide
  VARIANT (1)..(17): Xaa = Any Amino Acid
ACXXEWCANPAXCTGXC

SEQ ID NO: 13738 - protein, 16 aa, Artificial Sequence
  Synthetically generated peptide
  VARIANT (1)..(16): Xaa = Any Amino Acid
ACXXEWCANPACXTGC

SEQ ID NO: 13739 - protein, 17 aa, Artificial Sequence
  Synthetically generated peptide
  VARIANT (1)..(17): Xaa = Any Amino Acid
ACXXEWCANPACXXTGC

SEQ ID NO: 13740 - protein, 17 aa, Artificial Sequence
  Synthetically generated peptide
  VARIANT (1)..(17): Xaa = Any Amino Acid
ACXXEWCANPACXTXGC

SEQ ID NO: 13741 - protein, 17 aa, Artificial Sequence
  Synthetically generated peptide
  VARIANT (1)..(17): Xaa = Any Amino Acid
ACXXEWCANPACXTGXC

SEQ ID NO: 13742 - protein, 16 aa, Artificial Sequence
  Synthetically generated peptide
  VARIANT (1)..(16): Xaa = Any Amino Acid
ACXXEWCANPACTXGC

SEQ ID NO: 13743 - protein, 17 aa, Artificial Sequence
  Synthetically generated peptide
  VARIANT (1)..(17): Xaa = Any Amino Acid
ACXXEWCANPACTXXGC

SEQ ID NO: 13744 - protein, 17 aa, Artificial Sequence
  Synthetically generated peptide
  VARIANT (1)..(17): Xaa = Any Amino Acid
ACXXEWCANPACTXGXC

SEQ ID NO: 13745 - protein, 16 aa, Artificial Sequence
  Synthetically generated peptide
  VARIANT (1)..(16): Xaa = Any Amino Acid
ACXXEWCANPACTGXC

SEQ ID NO: 13746 - protein, 17 aa, Artificial Sequence
  Synthetically generated peptide
  VARIANT (1)..(17): Xaa = Any Amino Acid
ACXXEWCANPACTGXXC

SEQ ID NO: 13747 - protein, 15 aa, Artificial Sequence
  Synthetically generated peptide
  VARIANT (1)..(15): Xaa = Any Amino Acid
ACXEXWCANPACTGC

SEQ ID NO: 13748 - protein, 16 aa, Artificial Sequence
  Synthetically generated peptide
  VARIANT (1)..(16): Xaa = Any Amino Acid
ACXEXXWCANPACTGC

SEQ ID NO: 13749 - protein, 17 aa, Artificial Sequence
  Synthetically generated peptide
  VARIANT (1)..(17): Xaa = Any Amino Acid
ACXEXXXWCANPACTGC

SEQ ID NO: 13750 - protein, 17 aa, Artificial Sequence
  Synthetically generated peptide
  VARIANT (1)..(17): Xaa = Any Amino Acid
ACXEXXWXCANPACTGC

SEQ ID NO: 13751 - protein, 17 aa, Artificial Sequence
  Synthetically generated peptide
  VARIANT (1)..(17): Xaa = Any Amino Acid
ACXEXXWCAXNPACTGC

SEQ ID NO: 13752 - protein, 17 aa, Artificial Sequence
  Synthetically generated peptide
  VARIANT (1)..(17): Xaa = Any Amino Acid
ACXEXXWCANXPACTGC

SEQ ID NO: 13753 - protein, 17 aa, Artificial Sequence
  Synthetically generated peptide
  VARIANT (1)..(17): Xaa = Any Amino Acid
ACXEXXWCANPXACTGC

SEQ ID NO: 13754 - protein, 17 aa, Artificial Sequence
  Synthetically generated peptide
  VARIANT (1)..(17): Xaa = Any Amino Acid
ACXEXXWCANPAXCTGC

SEQ ID NO: 13755 - protein, 17 aa, Artificial Sequence
  Synthetically generated peptide
  VARIANT (1)..(17): Xaa = Any Amino Acid
ACXEXXWCANPACXTGC

SEQ ID NO: 13756 - protein, 17 aa, Artificial Sequence
  Synthetically generated peptide
  VARIANT (1)..(17): Xaa = Any Amino Acid
ACXEXXWCANPACTXGC

SEQ ID NO: 13757 - protein, 17 aa, Artificial Sequence
  Synthetically generated peptide
  VARIANT (1)..(17): Xaa = Any Amino Acid
ACXEXXWCANPACTGXC

SEQ ID NO: 13758 - protein, 16 aa, Artificial Sequence
  Synthetically generated peptide
  VARIANT (1)..(16): Xaa = Any Amino Acid
ACXEXWXCANPACTGC

SEQ ID NO: 13759 - protein, 17 aa, Artificial Sequence
  Synthetically generated peptide
  VARIANT (1)..(17): Xaa = Any Amino Acid
ACXEXWXXCANPACTGC

SEQ ID NO: 13760 - protein, 17 aa, Artificial Sequence
  Synthetically generated peptide
  VARIANT (1)..(17): Xaa = Any Amino Acid
ACXEXWXCAXNPACTGC

SEQ ID NO: 13761 - protein, 17 aa, Artificial Sequence
  Synthetically generated peptide
  VARIANT (1)..(17): Xaa = Any Amino Acid
ACXEXWXCANXPACTGC

SEQ ID NO: 13762 - protein, 17 aa, Artificial Sequence
  Synthetically generated peptide
  VARIANT (1)..(17): Xaa = Any Amino Acid
ACXEXWXCANPXACTGC

SEQ ID NO: 13763 - protein, 17 aa, Artificial Sequence
  Synthetically generated peptide
  VARIANT (1)..(17): Xaa = Any Amino Acid
ACXEXWXCANPAXCTGC

SEQ ID NO: 13764 - protein, 17 aa, Artificial Sequence
  Synthetically generated peptide
  VARIANT (1)..(17): Xaa = Any Amino Acid
ACXEXWXCANPACXTGC

SEQ ID NO: 13765 - protein, 17 aa, Artificial Sequence
  Synthetically generated peptide
  VARIANT (1)..(17): Xaa = Any Amino Acid
ACXEXWXCANPACTXGC

SEQ ID NO: 13766 - protein, 17 aa, Artificial Sequence
  Synthetically generated peptide
  VARIANT (1)..(17): Xaa = Any Amino Acid
ACXEXWXCANPACTGXC

SEQ ID NO: 13767 - protein, 16 aa, Artificial Sequence
  Synthetically generated peptide
  VARIANT (1)..(16): Xaa = Any Amino Acid
ACXEXWCAXNPACTGC

SEQ ID NO: 13768 - protein, 17 aa, Artificial Sequence
  Synthetically generated peptide
  VARIANT (1)..(17): Xaa = Any Amino Acid
ACXEXWCAXXNPACTGC

SEQ ID NO: 13769 - protein, 17 aa, Artificial Sequence
  Synthetically generated peptide
  VARIANT (1)..(17): Xaa = Any Amino Acid
ACXEXWCAXNXPACTGC

SEQ ID NO: 13770 - protein, 17 aa, Artificial Sequence
  Synthetically generated peptide
  VARIANT (1)..(17): Xaa = Any Amino Acid
ACXEXWCAXNPXACTGC

SEQ ID NO: 13771 - protein, 17 aa, Artificial Sequence
  Synthetically generated peptide
  VARIANT (1)..(17): Xaa = Any Amino Acid
ACXEXWCAXNPAXCTGC

SEQ ID NO: 13772 - protein, 17 aa, Artificial Sequence
  Synthetically generated peptide
  VARIANT (1)..(17): Xaa = Any Amino Acid
ACXEXWCAXNPACXTGC

SEQ ID NO: 13773 - protein, 17 aa, Artificial Sequence
  Synthetically generated peptide
  VARIANT (1)..(17): Xaa = Any Amino Acid
ACXEXWCAXNPACTXGC

SEQ ID NO: 13774 - protein, 17 aa, Artificial Sequence
  Synthetically generated peptide
  VARIANT (1)..(17): Xaa = Any Amino Acid
ACXEXWCAXNPACTGXC

SEQ ID NO: 13775 - protein, 16 aa, Artificial Sequence
  Synthetically generated peptide
  VARIANT (1)..(16): Xaa = Any Amino Acid
ACXEXWCANXPACTGC

SEQ ID NO: 13776 - protein, 17 aa, Artificial Sequence
  Synthetically generated peptide
  VARIANT (1)..(17): Xaa = Any Amino Acid
ACXEXWCANXXPACTGC

SEQ ID NO: 13777 - protein, 17 aa, Artificial Sequence
  Synthetically generated peptide
  VARIANT (1)..(17): Xaa = Any Amino Acid
ACXEXWCANXPXACTGC

SEQ ID NO: 13778 - protein, 17 aa, Artificial Sequence
  Synthetically generated peptide
  VARIANT (1)..(17): Xaa = Any Amino Acid
ACXEXWCANXPAXCTGC

SEQ ID NO: 13779 - protein, 17 aa, Artificial Sequence
  Synthetically generated peptide
  VARIANT (1)..(17): Xaa = Any Amino Acid
ACXEXWCANXPACXTGC

SEQ ID NO: 13780 - protein, 17 aa, Artificial Sequence
  Synthetically generated peptide
  VARIANT (1)..(17): Xaa = Any Amino Acid
ACXEXWCANXPACTXGC

SEQ ID NO: 13781 - protein, 17 aa, Artificial Sequence
  Synthetically generated peptide
  VARIANT (1)..(17): Xaa = Any Amino Acid
ACXEXWCANXPACTGXC

SEQ ID NO: 13782 - protein, 16 aa, Artificial Sequence
  Synthetically generated peptide
  VARIANT (1)..(16): Xaa = Any Amino Acid
ACXEXWCANPXACTGC

SEQ ID NO: 13783 - protein, 17 aa, Artificial Sequence
  Synthetically generated peptide
  VARIANT (1)..(17): Xaa = Any Amino Acid
ACXEXWCANPXXACTGC

SEQ ID NO: 13784 - protein, 17 aa, Artificial Sequence
  Synthetically generated peptide
  VARIANT (1)..(17): Xaa = Any Amino Acid
ACXEXWCANPXAXCTGC

SEQ ID NO: 13785 - protein, 17 aa, Artificial Sequence
  Synthetically generated peptide
  VARIANT (1)..(17): Xaa = Any Amino Acid
ACXEXWCANPXACXTGC

SEQ ID NO: 13786 - protein, 17 aa, Artificial Sequence
  Synthetically generated peptide
  VARIANT (1)..(17): Xaa = Any Amino Acid
ACXEXWCANPXACTXGC

SEQ ID NO: 13787 - protein, 17 aa, Artificial Sequence
  Synthetically generated peptide
  VARIANT (1)..(17): Xaa = Any Amino Acid
ACXEXWCANPXACTGXC

SEQ ID NO: 13788 - protein, 16 aa, Artificial Sequence
  Synthetically generated peptide
  VARIANT (1)..(16): Xaa = Any Amino Acid
ACXEXWCANPAXCTGC

SEQ ID NO: 13789 - protein, 17 aa, Artificial Sequence
  Synthetically generated peptide
  VARIANT (1)..(17): Xaa = Any Amino Acid
ACXEXWCANPAXXCTGC

SEQ ID NO: 13790 - protein, 17 aa, Artificial Sequence
  Synthetically generated peptide
  VARIANT (1)..(17): Xaa = Any Amino Acid
ACXEXWCANPAXCXTGC

SEQ ID NO: 13791 - protein, 17 aa, Artificial Sequence
  Synthetically generated peptide
  VARIANT (1)..(17): Xaa = Any Amino Acid
ACXEXWCANPAXCTXGC

SEQ ID NO: 13792 - protein, 17 aa, Artificial Sequence
  Synthetically generated peptide
  VARIANT (1)..(17): Xaa = Any Amino Acid
ACXEXWCANPAXCTGXC

SEQ ID NO: 13793 - protein, 16 aa, Artificial Sequence
  Synthetically generated peptide
  VARIANT (1)..(16): Xaa = Any Amino Acid
ACXEXWCANPACXTGC

SEQ ID NO: 13794 - protein, 17 aa, Artificial Sequence
  Synthetically generated peptide
  VARIANT (1)..(17): Xaa = Any Amino Acid
ACXEXWCANPACXXTGC

SEQ ID NO: 13795 - protein, 17 aa, Artificial Sequence
  Synthetically generated peptide
  VARIANT (1)..(17): Xaa = Any Amino Acid
ACXEXWCANPACXTXGC

SEQ ID NO: 13796 - protein, 17 aa, Artificial Sequence
  Synthetically generated peptide
  VARIANT (1)..(17): Xaa = Any Amino Acid
ACXEXWCANPACXTGXC

SEQ ID NO: 13797 - protein, 16 aa, Artificial Sequence
  Synthetically generated peptide
  VARIANT (1)..(16): Xaa = Any Amino Acid
ACXEXWCANPACTXGC

SEQ ID NO: 13798 - protein, 17 aa, Artificial Sequence
  Synthetically generated peptide
  VARIANT (1)..(17): Xaa = Any Amino Acid
ACXEXWCANPACTXXGC

SEQ ID NO: 13799 - protein, 17 aa, Artificial Sequence
  Synthetically generated peptide
  VARIANT (1)..(17): Xaa = Any Amino Acid
ACXEXWCANPACTXGXC

SEQ ID NO: 13800 - protein, 16 aa, Artificial Sequence
  Synthetically generated peptide
  VARIANT (1)..(16): Xaa = Any Amino Acid
ACXEXWCANPACTGXC

SEQ ID NO: 13801 - protein, 17 aa, Artificial Sequence
  Synthetically generated peptide
  VARIANT (1)..(17): Xaa = Any Amino Acid
ACXEXWCANPACTGXXC

SEQ ID NO: 13802 - protein, 15 aa, Artificial Sequence
  Synthetically generated peptide
  VARIANT (1)..(15): Xaa = Any Amino Acid
ACXEWXCANPACTGC

SEQ ID NO: 13803 - protein, 16 aa, Artificial Sequence
  Synthetically generated peptide
  VARIANT (1)..(16): Xaa = Any Amino Acid
ACXEWXXCANPACTGC

SEQ ID NO: 13804 - protein, 17 aa, Artificial Sequence
  Synthetically generated peptide
  VARIANT (1)..(17): Xaa = Any Amino Acid
ACXEWXXXCANPACTGC

SEQ ID NO: 13805 - protein, 17 aa, Artificial Sequence
  Synthetically generated peptide
  VARIANT (1)..(17): Xaa = Any Amino Acid
ACXEWXXCAXNPACTGC

SEQ ID NO: 13806 - protein, 17 aa, Artificial Sequence
  Synthetically generated peptide
  VARIANT (1)..(17): Xaa = Any Amino Acid
ACXEWXXCANXPACTGC

SEQ ID NO: 13807 - protein, 17 aa, Artificial Sequence
  Synthetically generated peptide
  VARIANT (1)..(17): Xaa = Any Amino Acid
ACXEWXXCANPXACTGC

SEQ ID NO: 13808 - protein, 17 aa, Artificial Sequence
  Synthetically generated peptide
  VARIANT (1)..(17): Xaa = Any Amino Acid
ACXEWXXCANPAXCTGC

SEQ ID NO: 13809 - protein, 17 aa, Artificial Sequence
  Synthetically generated peptide
  VARIANT (1)..(17): Xaa = Any Amino Acid
ACXEWXXCANPACXTGC

SEQ ID NO: 13810 - protein, 17 aa, Artificial Sequence
  Synthetically generated peptide
  VARIANT (1)..(17): Xaa = Any Amino Acid
ACXEWXXCANPACTXGC

SEQ ID NO: 13811 - protein, 17 aa, Artificial Sequence
  Synthetically generated peptide
  VARIANT (1)..(17): Xaa = Any Amino Acid
ACXEWXXCANPACTGXC

SEQ ID NO: 13812 - protein, 16 aa, Artificial Sequence
  Synthetically generated peptide
  VARIANT (1)..(16): Xaa = Any Amino Acid
ACXEWXCAXNPACTGC

SEQ ID NO: 13813 - protein, 17 aa, Artificial Sequence
  Synthetically generated peptide
  VARIANT (1)..(17): Xaa = Any Amino Acid
ACXEWXCAXXNPACTGC

SEQ ID NO: 13814 - protein, 17 aa, Artificial Sequence
  Synthetically generated peptide
  VARIANT (1)..(17): Xaa = Any Amino Acid
ACXEWXCAXNXPACTGC

SEQ ID NO: 13815 - protein, 17 aa, Artificial Sequence
  Synthetically generated peptide
  VARIANT (1)..(17): Xaa = Any Amino Acid
ACXEWXCAXNPXACTGC

SEQ ID NO: 13816 - protein, 17 aa, Artificial Sequence
  Synthetically generated peptide
  VARIANT (1)..(17): Xaa = Any Amino Acid
ACXEWXCAXNPAXCTGC

SEQ ID NO: 13817 - protein, 17 aa, Artificial Sequence
  Synthetically generated peptide
  VARIANT (1)..(17): Xaa = Any Amino Acid
ACXEWXCAXNPACXTGC

SEQ ID NO: 13818 - protein, 17 aa, Artificial Sequence
  Synthetically generated peptide
  VARIANT (1)..(17): Xaa = Any Amino Acid
ACXEWXCAXNPACTXGC

SEQ ID NO: 13819 - protein, 17 aa, Artificial Sequence
  Synthetically generated peptide
  VARIANT (1)..(17): Xaa = Any Amino Acid
ACXEWXCAXNPACTGXC

SEQ ID NO: 13820 - protein, 16 aa, Artificial Sequence
  Synthetically generated peptide
  VARIANT (1)..(16): Xaa = Any Amino Acid
ACXEWXCANXPACTGC

SEQ ID NO: 13821 - protein, 17 aa, Artificial Sequence
  Synthetically generated peptide
  VARIANT (1)..(17): Xaa = Any Amino Acid
ACXEWXCANXXPACTGC

SEQ ID NO: 13822 - protein, 17 aa, Artificial Sequence
  Synthetically generated peptide
  VARIANT (1)..(17): Xaa = Any Amino Acid
ACXEWXCANXPXACTGC

SEQ ID NO: 13823 - protein, 17 aa, Artificial Sequence
  Synthetically generated peptide
  VARIANT (1)..(17): Xaa = Any Amino Acid
ACXEWXCANXPAXCTGC

SEQ ID NO: 13824 - protein, 17 aa, Artificial Sequence
  Synthetically generated peptide
  VARIANT (1)..(17): Xaa = Any Amino Acid
ACXEWXCANXPACXTGC

SEQ ID NO: 13825 - protein, 17 aa, Artificial Sequence
  Synthetically generated peptide
  VARIANT (1)..(17): Xaa = Any Amino Acid
ACXEWXCANXPACTXGC

SEQ ID NO: 13826 - protein, 17 aa, Artificial Sequence
  Synthetically generated peptide
  VARIANT (1)..(17): Xaa = Any Amino Acid
ACXEWXCANXPACTGXC

SEQ ID NO: 13827 - protein, 16 aa, Artificial Sequence
  Synthetically generated peptide
  VARIANT (1)..(16): Xaa = Any Amino Acid
ACXEWXCANPXACTGC

SEQ ID NO: 13828 - protein, 17 aa, Artificial Sequence
  Synthetically generated peptide
  VARIANT (1)..(17): Xaa = Any Amino Acid
ACXEWXCANPXXACTGC

SEQ ID NO: 13829 - protein, 17 aa, Artificial Sequence
  Synthetically generated peptide
  VARIANT (1)..(17): Xaa = Any Amino Acid
ACXEWXCANPXAXCTGC

SEQ ID NO: 13830 - protein, 17 aa, Artificial Sequence
  Synthetically generated peptide
  VARIANT (1)..(17): Xaa = Any Amino Acid
ACXEWXCANPXACXTGC

SEQ ID NO: 13831 - protein, 17 aa, Artificial Sequence
  Synthetically generated peptide
  VARIANT (1)..(17): Xaa = Any Amino Acid
ACXEWXCANPXACTXGC

SEQ ID NO: 13832 - protein, 17 aa, Artificial Sequence
  Synthetically generated peptide
  VARIANT (1)..(17): Xaa = Any Amino Acid
ACXEWXCANPXACTGXC

SEQ ID NO: 13833 - protein, 16 aa, Artificial Sequence
  Synthetically generated peptide
  VARIANT (1)..(16): Xaa = Any Amino Acid
ACXEWXCANPAXCTGC

SEQ ID NO: 13834 - protein, 17 aa, Artificial Sequence
  Synthetically generated peptide
  VARIANT (1)..(17): Xaa = Any Amino Acid
ACXEWXCANPAXXCTGC

SEQ ID NO: 13835 - protein, 17 aa, Artificial Sequence
  Synthetically generated peptide
  VARIANT (1)..(17): Xaa = Any Amino Acid
ACXEWXCANPAXCXTGC

SEQ ID NO: 13836 - protein, 17 aa, Artificial Sequence
  Synthetically generated peptide
  VARIANT (1)..(17): Xaa = Any Amino Acid
ACXEWXCANPAXCTXGC

SEQ ID NO: 13837 - protein, 17 aa, Artificial Sequence
  Synthetically generated peptide
  VARIANT (1)..(17): Xaa = Any Amino Acid
ACXEWXCANPAXCTGXC

SEQ ID NO: 13838 - protein, 16 aa, Artificial Sequence
  Synthetically generated peptide
  VARIANT (1)..(16): Xaa = Any Amino Acid
ACXEWXCANPACXTGC

SEQ ID NO: 13839 - protein, 17 aa, Artificial Sequence
  Synthetically generated peptide
  VARIANT (1)..(17): Xaa = Any Amino Acid
ACXEWXCANPACXXTGC

SEQ ID NO: 13840 - protein, 17 aa, Artificial Sequence
  Synthetically generated peptide
  VARIANT (1)..(17): Xaa = Any Amino Acid
ACXEWXCANPACXTXGC

SEQ ID NO: 13841 - protein, 17 aa, Artificial Sequence
  Synthetically generated peptide
  VARIANT (1)..(17): Xaa = Any Amino Acid
ACXEWXCANPACXTGXC

SEQ ID NO: 13842 - protein, 16 aa, Artificial Sequence
  Synthetically generated peptide
  VARIANT (1)..(16): Xaa = Any Amino Acid
ACXEWXCANPACTXGC

SEQ ID NO: 13843 - protein, 17 aa, Artificial Sequence
  Synthetically generated peptide
  VARIANT (1)..(17): Xaa = Any Amino Acid
ACXEWXCANPACTXXGC

SEQ ID NO: 13844 - protein, 17 aa, Artificial Sequence
  Synthetically generated peptide
  VARIANT (1)..(17): Xaa = Any Amino Acid
ACXEWXCANPACTXGXC

SEQ ID NO: 13845 - protein, 16 aa, Artificial Sequence
  Synthetically generated peptide
  VARIANT (1)..(16): Xaa = Any Amino Acid
ACXEWXCANPACTGXC

SEQ ID NO: 13846 - protein, 17 aa, Artificial Sequence
  Synthetically generated peptide
  VARIANT (1)..(17): Xaa = Any Amino Acid
ACXEWXCANPACTGXXC

SEQ ID NO: 13847 - protein, 15 aa, Artificial Sequence
  Synthetically generated peptide
  VARIANT (1)..(15): Xaa = Any Amino Acid
ACXEWCAXNPACTGC

SEQ ID NO: 13848 - protein, 16 aa, Artificial Sequence
  Synthetically generated peptide
  VARIANT (1)..(16): Xaa = Any Amino Acid
ACXEWCAXXNPACTGC

SEQ ID NO: 13849 - protein, 17 aa, Artificial Sequence
  Synthetically generated peptide
  VARIANT (1)..(17): Xaa = Any Amino Acid
ACXEWCAXXXNPACTGC

SEQ ID NO: 13850 - protein, 17 aa, Artificial Sequence
  Synthetically generated peptide
  VARIANT (1)..(17): Xaa = Any Amino Acid
ACXEWCAXXNXPACTGC

SEQ ID NO: 13851 - protein, 17 aa, Artificial Sequence
  Synthetically generated peptide
  VARIANT (1)..(17): Xaa = Any Amino Acid
ACXEWCAXXNPXACTGC

SEQ ID NO: 13852 - protein, 17 aa, Artificial Sequence
  Synthetically generated peptide
  VARIANT (1)..(17): Xaa = Any Amino Acid
ACXEWCAXXNPAXCTGC

SEQ ID NO: 13853 - protein, 17 aa, Artificial Sequence
  Synthetically generated peptide
  VARIANT (1)..(17): Xaa = Any Amino Acid
ACXEWCAXXNPACXTGC

SEQ ID NO: 13854 - protein, 17 aa, Artificial Sequence
  Synthetically generated peptide
  VARIANT (1)..(17): Xaa = Any Amino Acid
ACXEWCAXXNPACTXGC

SEQ ID NO: 13855 - protein, 17 aa, Artificial Sequence
  Synthetically generated peptide
  VARIANT (1)..(17): Xaa = Any Amino Acid
ACXEWCAXXNPACTGXC

SEQ ID NO: 13856 - protein, 16 aa, Artificial Sequence
  Synthetically generated peptide
  VARIANT (1)..(16): Xaa = Any Amino Acid
ACXEWCAXNXPACTGC

SEQ ID NO: 13857 - protein, 17 aa, Artificial Sequence
  Synthetically generated peptide
  VARIANT (1)..(17): Xaa = Any Amino Acid
ACXEWCAXNXXPACTGC

SEQ ID NO: 13858 - protein, 17 aa, Artificial Sequence
  Synthetically generated peptide
  VARIANT (1)..(17): Xaa = Any Amino Acid
ACXEWCAXNXPXACTGC

SEQ ID NO: 13859 - protein, 17 aa, Artificial Sequence
  Synthetically generated peptide
  VARIANT (1)..(17): Xaa = Any Amino Acid
ACXEWCAXNXPAXCTGC

SEQ ID NO: 13860 - protein, 17 aa, Artificial Sequence
  Synthetically generated peptide
  VARIANT (1)..(17): Xaa = Any Amino Acid
ACXEWCAXNXPACXTGC

SEQ ID NO: 13861 - protein, 17 aa, Artificial Sequence
  Synthetically generated peptide
  VARIANT (1)..(17): Xaa = Any Amino Acid
ACXEWCAXNXPACTXGC

SEQ ID NO: 13862 - protein, 17 aa, Artificial Sequence
  Synthetically generated peptide
  VARIANT (1)..(17): Xaa = Any Amino Acid
ACXEWCAXNXPACTGXC

SEQ ID NO: 13863 - protein, 16 aa, Artificial Sequence
  Synthetically generated peptide
  VARIANT (1)..(16): Xaa = Any Amino Acid
ACXEWCAXNPXACTGC

SEQ ID NO: 13864 - protein, 17 aa, Artificial Sequence
  Synthetically generated peptide
  VARIANT (1)..(17): Xaa = Any Amino Acid
ACXEWCAXNPXXACTGC

SEQ ID NO: 13865 - protein, 17 aa, Artificial Sequence
  Synthetically generated peptide
  VARIANT (1)..(17): Xaa = Any Amino Acid
ACXEWCAXNPXAXCTGC

SEQ ID NO: 13866 - protein, 17 aa, Artificial Sequence
  Synthetically generated peptide
  VARIANT (1)..(17): Xaa = Any Amino Acid
ACXEWCAXNPXACXTGC

SEQ ID NO: 13867 - protein, 17 aa, Artificial Sequence
  Synthetically generated peptide
  VARIANT (1)..(17): Xaa = Any Amino Acid
ACXEWCAXNPXACTXGC

SEQ ID NO: 13868 - protein, 17 aa, Artificial Sequence
  Synthetically generated peptide
  VARIANT (1)..(17): Xaa = Any Amino Acid
ACXEWCAXNPXACTGXC

SEQ ID NO: 13869 - protein, 16 aa, Artificial Sequence
  Synthetically generated peptide
  VARIANT (1)..(16): Xaa = Any Amino Acid
ACXEWCAXNPAXCTGC

SEQ ID NO: 13870 - protein, 17 aa, Artificial Sequence
  Synthetically generated peptide
  VARIANT (1)..(17): Xaa = Any Amino Acid
ACXEWCAXNPAXXCTGC

SEQ ID NO: 13871 - protein, 17 aa, Artificial Sequence
  Synthetically generated peptide
  VARIANT (1)..(17): Xaa = Any Amino Acid
ACXEWCAXNPAXCXTGC

SEQ ID NO: 13872 - protein, 17 aa, Artificial Sequence
  Synthetically generated peptide
  VARIANT (1)..(17): Xaa = Any Amino Acid
ACXEWCAXNPAXCTXGC

SEQ ID NO: 13873 - protein, 17 aa, Artificial Sequence
  Synthetically generated peptide
  VARIANT (1)..(17): Xaa = Any Amino Acid
ACXEWCAXNPAXCTGXC

SEQ ID NO: 13874 - protein, 16 aa, Artificial Sequence
  Synthetically generated peptide
  VARIANT (1)..(16): Xaa = Any Amino Acid
ACXEWCAXNPACXTGC

SEQ ID NO: 13875 - protein, 17 aa, Artificial Sequence
  Synthetically generated peptide
  VARIANT (1)..(17): Xaa = Any Amino Acid
ACXEWCAXNPACXXTGC

SEQ ID NO: 13876 - protein, 17 aa, Artificial Sequence
  Synthetically generated peptide
  VARIANT (1)..(17): Xaa = Any Amino Acid
ACXEWCAXNPACXTXGC

SEQ ID NO: 13877 - protein, 17 aa, Artificial Sequence
  Synthetically generated peptide
  VARIANT (1)..(17): Xaa = Any Amino Acid
ACXEWCAXNPACXTGXC

SEQ ID NO: 13878 - protein, 16 aa, Artificial Sequence
  Synthetically generated peptide
  VARIANT (1)..(16): Xaa = Any Amino Acid
ACXEWCAXNPACTXGC

SEQ ID NO: 13879 - protein, 17 aa, Artificial Sequence
  Synthetically generated peptide
  VARIANT (1)..(17): Xaa = Any Amino Acid
ACXEWCAXNPACTXXGC

SEQ ID NO: 13880 - protein, 17 aa, Artificial Sequence
  Synthetically generated peptide
  VARIANT (1)..(17): Xaa = Any Amino Acid
ACXEWCAXNPACTXGXC

SEQ ID NO: 13881 - protein, 16 aa, Artificial Sequence
  Synthetically generated peptide
  VARIANT (1)..(16): Xaa = Any Amino Acid
ACXEWCAXNPACTGXC

SEQ ID NO: 13882 - protein, 17 aa, Artificial Sequence
  Synthetically generated peptide
  VARIANT (1)..(17): Xaa = Any Amino Acid
ACXEWCAXNPACTGXXC

SEQ ID NO: 13883 - protein, 15 aa, Artificial Sequence
  Synthetically generated peptide
  VARIANT (1)..(15): Xaa = Any Amino Acid
ACXEWCANXPACTGC

SEQ ID NO: 13884 - protein, 16 aa, Artificial Sequence
  Synthetically generated peptide
  VARIANT (1)..(16): Xaa = Any Amino Acid
ACXEWCANXXPACTGC

SEQ ID NO: 13885 - protein, 17 aa, Artificial Sequence
  Synthetically generated peptide
  VARIANT (1)..(17): Xaa = Any Amino Acid
ACXEWCANXXXPACTGC

SEQ ID NO: 13886 - protein, 17 aa, Artificial Sequence
  Synthetically generated peptide
  VARIANT (1)..(17): Xaa = Any Amino Acid
ACXEWCANXXPXACTGC

SEQ ID NO: 13887 - protein, 17 aa, Artificial Sequence
  Synthetically generated peptide
  VARIANT (1)..(17): Xaa = Any Amino Acid
ACXEWCANXXPAXCTGC

SEQ ID NO: 13888 - protein, 17 aa, Artificial Sequence
  Synthetically generated peptide
  VARIANT (1)..(17): Xaa = Any Amino Acid
ACXEWCANXXPACXTGC

SEQ ID NO: 13889 - protein, 17 aa, Artificial Sequence
  Synthetically generated peptide
  VARIANT (1)..(17): Xaa = Any Amino Acid
ACXEWCANXXPACTXGC

SEQ ID NO: 13890 - protein, 17 aa, Artificial Sequence
  Synthetically generated peptide
  VARIANT (1)..(17): Xaa = Any Amino Acid
ACXEWCANXXPACTGXC

SEQ ID NO: 13891 - protein, 16 aa, Artificial Sequence
  Synthetically generated peptide
  VARIANT (1)..(16): Xaa = Any Amino Acid
ACXEWCANXPXACTGC

SEQ ID NO: 13892 - protein, 17 aa, Artificial Sequence
  Synthetically generated peptide
  VARIANT (1)..(17): Xaa = Any Amino Acid
ACXEWCANXPXXACTGC

SEQ ID NO: 13893 - protein, 17 aa, Artificial Sequence
  Synthetically generated peptide
  VARIANT (1)..(17): Xaa = Any Amino Acid
ACXEWCANXPXAXCTGC

SEQ ID NO: 13894 - protein, 17 aa, Artificial Sequence
  Synthetically generated peptide
  VARIANT (1)..(17): Xaa = Any Amino Acid
ACXEWCANXPXACXTGC

SEQ ID NO: 13895 - protein, 17 aa, Artificial Sequence
  Synthetically generated peptide
  VARIANT (1)..(17): Xaa = Any Amino Acid
ACXEWCANXPXACTXGC

SEQ ID NO: 13896 - protein, 17 aa, Artificial Sequence
  Synthetically generated peptide
  VARIANT (1)..(17): Xaa = Any Amino Acid
ACXEWCANXPXACTGXC

SEQ ID NO: 13897 - protein, 16 aa, Artificial Sequence
  Synthetically generated peptide
  VARIANT (1)..(16): Xaa = Any Amino Acid
ACXEWCANXPAXCTGC

SEQ ID NO: 13898 - protein, 17 aa, Artificial Sequence
  Synthetically generated peptide
  VARIANT (1)..(17): Xaa = Any Amino Acid
ACXEWCANXPAXXCTGC

SEQ ID NO: 13899 - protein, 17 aa, Artificial Sequence
  Synthetically generated peptide
  VARIANT (1)..(17): Xaa = Any Amino Acid
ACXEWCANXPAXCXTGC

SEQ ID NO: 13900 - protein, 17 aa, Artificial Sequence
  Synthetically generated peptide
  VARIANT (1)..(17): Xaa = Any Amino Acid
ACXEWCANXPAXCTXGC

SEQ ID NO: 13901 - protein, 17 aa, Artificial Sequence
  Synthetically generated peptide
  VARIANT (1)..(17): Xaa = Any Amino Acid
ACXEWCANXPAXCTGXC

SEQ ID NO: 13902 - protein, 16 aa, Artificial Sequence
  Synthetically generated peptide
  VARIANT (1)..(16): Xaa = Any Amino Acid
ACXEWCANXPACXTGC

SEQ ID NO: 13903 - protein, 17 aa, Artificial Sequence
  Synthetically generated peptide
  VARIANT (1)..(17): Xaa = Any Amino Acid
ACXEWCANXPACXXTGC

SEQ ID NO: 13904 - protein, 17 aa, Artificial Sequence
  Synthetically generated peptide
  VARIANT (1)..(17): Xaa = Any Amino Acid
ACXEWCANXPACXTXGC

SEQ ID NO: 13905 - protein, 17 aa, Artificial Sequence
  Synthetically generated peptide
  VARIANT (1)..(17): Xaa = Any Amino Acid
ACXEWCANXPACXTGXC

SEQ ID NO: 13906 - protein, 16 aa, Artificial Sequence
  Synthetically generated peptide
  VARIANT (1)..(16): Xaa = Any Amino Acid
ACXEWCANXPACTXGC

SEQ ID NO: 13907 - protein, 17 aa, Artificial Sequence
  Synthetically generated peptide
  VARIANT (1)..(17): Xaa = Any Amino Acid
ACXEWCANXPACTXXGC

SEQ ID NO: 13908 - protein, 17 aa, Artificial Sequence
  Synthetically generated peptide
  VARIANT (1)..(17): Xaa = Any Amino Acid
ACXEWCANXPACTXGXC

SEQ ID NO: 13909 - protein, 16 aa, Artificial Sequence
  Synthetically generated peptide
  VARIANT (1)..(16): Xaa = Any Amino Acid
ACXEWCANXPACTGXC

SEQ ID NO: 13910 - protein, 17 aa, Artificial Sequence
  Synthetically generated peptide
  VARIANT (1)..(17): Xaa = Any Amino Acid
ACXEWCANXPACTGXXC

SEQ ID NO: 13911 - protein, 15 aa, Artificial Sequence
  Synthetically generated peptide
  VARIANT (1)..(15): Xaa = Any Amino Acid
ACXEWCANPXACTGC

SEQ ID NO: 13912 - protein, 16 aa, Artificial Sequence
  Synthetically generated peptide
  VARIANT (1)..(16): Xaa = Any Amino Acid
ACXEWCANPXXACTGC

SEQ ID NO: 13913 - protein, 17 aa, Artificial Sequence
  Synthetically generated peptide
  VARIANT (1)..(17): Xaa = Any Amino Acid
ACXEWCANPXXXACTGC

SEQ ID NO: 13914 - protein, 17 aa, Artificial Sequence
  Synthetically generated peptide
  VARIANT (1)..(17): Xaa = Any Amino Acid
ACXEWCANPXXAXCTGC

SEQ ID NO: 13915 - protein, 17 aa, Artificial Sequence
  Synthetically generated peptide
  VARIANT (1)..(17): Xaa = Any Amino Acid
ACXEWCANPXXACXTGC

SEQ ID NO: 13916 - protein, 17 aa, Artificial Sequence
  Synthetically generated peptide
  VARIANT (1)..(17): Xaa = Any Amino Acid
ACXEWCANPXXACTXGC

SEQ ID NO: 13917 - protein, 17 aa, Artificial Sequence
  Synthetically generated peptide
  VARIANT (1)..(17): Xaa = Any Amino Acid
ACXEWCANPXXACTGXC

SEQ ID NO: 13918 - protein, 16 aa, Artificial Sequence
  Synthetically generated peptide
  VARIANT (1)..(16): Xaa = Any Amino Acid
ACXEWCANPXAXCTGC

SEQ ID NO: 13919 - protein, 17 aa, Artificial Sequence
  Synthetically generated peptide
  VARIANT (1)..(17): Xaa = Any Amino Acid
ACXEWCANPXAXXCTGC

SEQ ID NO: 13920 - protein, 17 aa, Artificial Sequence
  Synthetically generated peptide
  VARIANT (1)..(17): Xaa = Any Amino Acid
ACXEWCANPXAXCXTGC

SEQ ID NO: 13921 - protein, 17 aa, Artificial Sequence
  Synthetically generated peptide
  VARIANT (1)..(17): Xaa = Any Amino Acid
ACXEWCANPXAXCTXGC

SEQ ID NO: 13922 - protein, 17 aa, Artificial Sequence
  Synthetically generated peptide
  VARIANT (1)..(17): Xaa = Any Amino Acid
ACXEWCANPXAXCTGXC

SEQ ID NO: 13923 - protein, 16 aa, Artificial Sequence
  Synthetically generated peptide
  VARIANT (1)..(16): Xaa = Any Amino Acid
ACXEWCANPXACXTGC

SEQ ID NO: 13924 - protein, 17 aa, Artificial Sequence
  Synthetically generated peptide
  VARIANT (1)..(17): Xaa = Any Amino Acid
ACXEWCANPXACXXTGC

SEQ ID NO: 13925 - protein, 17 aa, Artificial Sequence
  Synthetically generated peptide
  VARIANT (1)..(17): Xaa = Any Amino Acid
ACXEWCANPXACXTXGC

SEQ ID NO: 13926 - protein, 17 aa, Artificial Sequence
  Synthetically generated peptide
  VARIANT (1)..(17): Xaa = Any Amino Acid
ACXEWCANPXACXTGXC

SEQ ID NO: 13927 - protein, 16 aa, Artificial Sequence
  Synthetically generated peptide
  VARIANT (1)..(16): Xaa = Any Amino Acid
ACXEWCANPXACTXGC

SEQ ID NO: 13928 - protein, 17 aa, Artificial Sequence
  Synthetically generated peptide
  VARIANT (1)..(17): Xaa = Any Amino Acid
ACXEWCANPXACTXXGC

SEQ ID NO: 13929 - protein, 17 aa, Artificial Sequence
  Synthetically generated peptide
  VARIANT (1)..(17): Xaa = Any Amino Acid
ACXEWCANPXACTXGXC

SEQ ID NO: 13930 - protein, 16 aa, Artificial Sequence
  Synthetically generated peptide
  VARIANT (1)..(16): Xaa = Any Amino Acid
ACXEWCANPXACTGXC

SEQ ID NO: 13931 - protein, 17 aa, Artificial Sequence
  Synthetically generated peptide
  VARIANT (1)..(17): Xaa = Any Amino Acid
ACXEWCANPXACTGXXC

SEQ ID NO: 13932 - protein, 15 aa, Artificial Sequence
  Synthetically generated peptide
  VARIANT (1)..(15): Xaa = Any Amino Acid
ACXEWCANPAXCTGC

SEQ ID NO: 13933 - protein, 16 aa, Artificial Sequence
  Synthetically generated peptide
  VARIANT (1)..(16): Xaa = Any Amino Acid
ACXEWCANPAXXCTGC

SEQ ID NO: 13934 - protein, 17 aa, Artificial Sequence
  Synthetically generated peptide
  VARIANT (1)..(17): Xaa = Any Amino Acid
ACXEWCANPAXXXCTGC

SEQ ID NO: 13935 - protein, 17 aa, Artificial Sequence
  Synthetically generated peptide
  VARIANT (1)..(17): Xaa = Any Amino Acid
ACXEWCANPAXXCXTGC

SEQ ID NO: 13936 - protein, 17 aa, Artificial Sequence
  Synthetically generated peptide
  VARIANT (1)..(17): Xaa = Any Amino Acid
ACXEWCANPAXXCTXGC

SEQ ID NO: 13937 - protein, 17 aa, Artificial Sequence
  Synthetically generated peptide
  VARIANT (1)..(17): Xaa = Any Amino Acid
ACXEWCANPAXXCTGXC

SEQ ID NO: 13938 - protein, 16 aa, Artificial Sequence
  Synthetically generated peptide
  VARIANT (1)..(16): Xaa = Any Amino Acid
ACXEWCANPAXCXTGC

SEQ ID NO: 13939 - protein, 17 aa, Artificial Sequence
  Synthetically generated peptide
  VARIANT (1)..(17): Xaa = Any Amino Acid
ACXEWCANPAXCXXTGC

SEQ ID NO: 13940 - protein, 17 aa, Artificial Sequence
  Synthetically generated peptide
  VARIANT (1)..(17): Xaa = Any Amino Acid
ACXEWCANPAXCXTXGC

SEQ ID NO: 13941 - protein, 17 aa, Artificial Sequence
  Synthetically generated peptide
  VARIANT (1)..(17): Xaa = Any Amino Acid
ACXEWCANPAXCXTGXC

SEQ ID NO: 13942 - protein, 16 aa, Artificial Sequence
  Synthetically generated peptide
  VARIANT (1)..(16): Xaa = Any Amino Acid
ACXEWCANPAXCTXGC

SEQ ID NO: 13943 - protein, 17 aa, Artificial Sequence
  Synthetically generated peptide
  VARIANT (1)..(17): Xaa = Any Amino Acid
ACXEWCANPAXCTXXGC

SEQ ID NO: 13944 - protein, 17 aa, Artificial Sequence
  Synthetically generated peptide
  VARIANT (1)..(17): Xaa = Any Amino Acid
ACXEWCANPAXCTXGXC

SEQ ID NO: 13945 - protein, 16 aa, Artificial Sequence
  Synthetically generated peptide
  VARIANT (1)..(16): Xaa = Any Amino Acid
ACXEWCANPAXCTGXC

SEQ ID NO: 13946 - protein, 17 aa, Artificial Sequence
  Synthetically generated peptide
  VARIANT (1)..(17): Xaa = Any Amino Acid
ACXEWCANPAXCTGXXC

SEQ ID NO: 13947 - protein, 15 aa, Artificial Sequence
  Synthetically generated peptide
  VARIANT (1)..(15): Xaa = Any Amino Acid
ACXEWCANPACXTGC

SEQ ID NO: 13948 - protein, 16 aa, Artificial Sequence
  Synthetically generated peptide
  VARIANT (1)..(16): Xaa = Any Amino Acid
ACXEWCANPACXXTGC

SEQ ID NO: 13949 - protein, 17 aa, Artificial Sequence
  Synthetically generated peptide
  VARIANT (1)..(17): Xaa = Any Amino Acid
ACXEWCANPACXXXTGC

SEQ ID NO: 13950 - protein, 17 aa, Artificial Sequence
  Synthetically generated peptide
  VARIANT (1)..(17): Xaa = Any Amino Acid
ACXEWCANPACXXTXGC

SEQ ID NO: 13951 - protein, 17 aa, Artificial Sequence
  Synthetically generated peptide
  VARIANT (1)..(17): Xaa = Any Amino Acid
ACXEWCANPACXXTGXC

SEQ ID NO: 13952 - protein, 16 aa, Artificial Sequence
  Synthetically generated peptide
  VARIANT (1)..(16): Xaa = Any Amino Acid
ACXEWCANPACXTXGC

SEQ ID NO: 13953 - protein, 17 aa, Artificial Sequence
  Synthetically generated peptide
  VARIANT (1)..(17): Xaa = Any Amino Acid
ACXEWCANPACXTXXGC

SEQ ID NO: 13954 - protein, 17 aa, Artificial Sequence
  Synthetically generated peptide
  VARIANT (1)..(17): Xaa = Any Amino Acid
ACXEWCANPACXTXGXC

SEQ ID NO: 13955 - protein, 16 aa, Artificial Sequence
  Synthetically generated peptide
  VARIANT (1)..(16): Xaa = Any Amino Acid
ACXEWCANPACXTGXC

SEQ ID NO: 13956 - protein, 17 aa, Artificial Sequence
  Synthetically generated peptide
  VARIANT (1)..(17): Xaa = Any Amino Acid
ACXEWCANPACXTGXXC

SEQ ID NO: 13957 - protein, 15 aa, Artificial Sequence
  Synthetically generated peptide
  VARIANT (1)..(15): Xaa = Any Amino Acid
ACXEWCANPACTXGC

SEQ ID NO: 13958 - protein, 16 aa, Artificial Sequence
  Synthetically generated peptide
  VARIANT (1)..(16): Xaa = Any Amino Acid
ACXEWCANPACTXXGC

SEQ ID NO: 13959 - protein, 17 aa, Artificial Sequence
  Synthetically generated peptide
  VARIANT (1)..(17): Xaa = Any Amino Acid
ACXEWCANPACTXXXGC

SEQ ID NO: 13960 - protein, 17 aa, Artificial Sequence
  Synthetically generated peptide
  VARIANT (1)..(17): Xaa = Any Amino Acid
ACXEWCANPACTXXGXC

SEQ ID NO: 13961 - protein, 16 aa, Artificial Sequence
  Synthetically generated peptide
  VARIANT (1)..(16): Xaa = Any Amino Acid
ACXEWCANPACTXGXC

SEQ ID NO: 13962 - protein, 17 aa, Artificial Sequence
  Synthetically generated peptide
  VARIANT (1)..(17): Xaa = Any Amino Acid
ACXEWCANPACTXGXXC

SEQ ID NO: 13963 - protein, 15 aa, Artificial Sequence
  Synthetically generated peptide
  VARIANT (1)..(15): Xaa = Any Amino Acid
ACXEWCANPACTGXC

SEQ ID NO: 13964 - protein, 16 aa, Artificial Sequence
  Synthetically generated peptide
  VARIANT (1)..(16): Xaa = Any Amino Acid
ACXEWCANPACTGXXC

SEQ ID NO: 13965 - protein, 17 aa, Artificial Sequence
  Synthetically generated peptide
  VARIANT (1)..(17): Xaa = Any Amino Acid
ACXEWCANPACTGXXXC

SEQ ID NO: 13966 - protein, 14 aa, Artificial Sequence
  Synthetically generated peptide
  VARIANT (1)..(14): Xaa = Any Amino Acid
ACEXWCANPACTGC

SEQ ID NO: 13967 - protein, 15 aa, Artificial Sequence
  Synthetically generated peptide
  VARIANT (1)..(15): Xaa = Any Amino Acid
ACEXXWCANPACTGC

SEQ ID NO: 13968 - protein, 16 aa, Artificial Sequence
  Synthetically generated peptide
  VARIANT (1)..(16): Xaa = Any Amino Acid
ACEXXXWCANPACTGC

SEQ ID NO: 13969 - protein, 17 aa, Artificial Sequence
  Synthetically generated peptide
  VARIANT (1)..(17): Xaa = Any Amino Acid
ACEXXXXWCANPACTGC

SEQ ID NO: 13970 - protein, 17 aa, Artificial Sequence
  Synthetically generated peptide
  VARIANT (1)..(17): Xaa = Any Amino Acid
ACEXXXWXCANPACTGC

SEQ ID NO: 13971 - protein, 17 aa, Artificial Sequence
  Synthetically generated peptide
  VARIANT (1)..(17): Xaa = Any Amino Acid
ACEXXXWCAXNPACTGC

SEQ ID NO: 13972 - protein, 17 aa, Artificial Sequence
  Synthetically generated peptide
  VARIANT (1)..(17): Xaa = Any Amino Acid
ACEXXXWCANXPACTGC

SEQ ID NO: 13973 - protein, 17 aa, Artificial Sequence
  Synthetically generated peptide
  VARIANT (1)..(17): Xaa = Any Amino Acid
ACEXXXWCANPXACTGC

SEQ ID NO: 13974 - protein, 17 aa, Artificial Sequence
  Synthetically generated peptide
  VARIANT (1)..(17): Xaa = Any Amino Acid
ACEXXXWCANPAXCTGC

SEQ ID NO: 13975 - protein, 17 aa, Artificial Sequence
  Synthetically generated peptide
  VARIANT (1)..(17): Xaa = Any Amino Acid
ACEXXXWCANPACXTGC

SEQ ID NO: 13976 - protein, 17 aa, Artificial Sequence
  Synthetically generated peptide
  VARIANT (1)..(17): Xaa = Any Amino Acid
ACEXXXWCANPACTXGC

SEQ ID NO: 13977 - protein, 17 aa, Artificial Sequence
  Synthetically generated peptide
  VARIANT (1)..(17): Xaa = Any Amino Acid
ACEXXXWCANPACTGXC

SEQ ID NO: 13978 - protein, 16 aa, Artificial Sequence
  Synthetically generated peptide
  VARIANT (1)..(16): Xaa = Any Amino Acid
ACEXXWXCANPACTGC

SEQ ID NO: 13979 - protein, 17 aa, Artificial Sequence
  Synthetically generated peptide
  VARIANT (1)..(17): Xaa = Any Amino Acid
ACEXXWXXCANPACTGC

SEQ ID NO: 13980 - protein, 17 aa, Artificial Sequence
  Synthetically generated peptide
  VARIANT (1)..(17): Xaa = Any Amino Acid
ACEXXWXCAXNPACTGC

SEQ ID NO: 13981 - protein, 17 aa, Artificial Sequence
  Synthetically generated peptide
  VARIANT (1)..(17): Xaa = Any Amino Acid
ACEXXWXCANXPACTGC

SEQ ID NO: 13982 - protein, 17 aa, Artificial Sequence
  Synthetically generated peptide
  VARIANT (1)..(17): Xaa = Any Amino Acid
ACEXXWXCANPXACTGC

SEQ ID NO: 13983 - protein, 17 aa, Artificial Sequence
  Synthetically generated peptide
  VARIANT (1)..(17): Xaa = Any Amino Acid
ACEXXWXCANPAXCTGC

SEQ ID NO: 13984 - protein, 17 aa, Artificial Sequence
  Synthetically generated peptide
  VARIANT (1)..(17): Xaa = Any Amino Acid
ACEXXWXCANPACXTGC

SEQ ID NO: 13985 - protein, 17 aa, Artificial Sequence
  Synthetically generated peptide
  VARIANT (1)..(17): Xaa = Any Amino Acid
ACEXXWXCANPACTXGC

SEQ ID NO: 13986 - protein, 17 aa, Artificial Sequence
  Synthetically generated peptide
  VARIANT (1)..(17): Xaa = Any Amino Acid
ACEXXWXCANPACTGXC

SEQ ID NO: 13987 - protein, 16 aa, Artificial Sequence
  Synthetically generated peptide
  VARIANT (1)..(16): Xaa = Any Amino Acid
ACEXXWCAXNPACTGC

SEQ ID NO: 13988 - protein, 17 aa, Artificial Sequence
  Synthetically generated peptide
  VARIANT (1)..(17): Xaa = Any Amino Acid
ACEXXWCAXXNPACTGC

SEQ ID NO: 13989 - protein, 17 aa, Artificial Sequence
  Synthetically generated peptide
  VARIANT (1)..(17): Xaa = Any Amino Acid
ACEXXWCAXNXPACTGC

SEQ ID NO: 13990 - protein, 17 aa, Artificial Sequence
  Synthetically generated peptide
  VARIANT (1)..(17): Xaa = Any Amino Acid
ACEXXWCAXNPXACTGC

SEQ ID NO: 13991 - protein, 17 aa, Artificial Sequence
  Synthetically generated peptide
  VARIANT (1)..(17): Xaa = Any Amino Acid
ACEXXWCAXNPAXCTGC

SEQ ID NO: 13992 - protein, 17 aa, Artificial Sequence
  Synthetically generated peptide
  VARIANT (1)..(17): Xaa = Any Amino Acid
ACEXXWCAXNPACXTGC

SEQ ID NO: 13993 - protein, 17 aa, Artificial Sequence
  Synthetically generated peptide
  VARIANT (1)..(17): Xaa = Any Amino Acid
ACEXXWCAXNPACTXGC

SEQ ID NO: 13994 - protein, 17 aa, Artificial Sequence
  Synthetically generated peptide
  VARIANT (1)..(17): Xaa = Any Amino Acid
ACEXXWCAXNPACTGXC

SEQ ID NO: 13995 - protein, 16 aa, Artificial Sequence
  Synthetically generated peptide
  VARIANT (1)..(16): Xaa = Any Amino Acid
ACEXXWCANXPACTGC

SEQ ID NO: 13996 - protein, 17 aa, Artificial Sequence
  Synthetically generated peptide
  VARIANT (1)..(17): Xaa = Any Amino Acid
ACEXXWCANXXPACTGC

SEQ ID NO: 13997 - protein, 17 aa, Artificial Sequence
  Synthetically generated peptide
  VARIANT (1)..(17): Xaa = Any Amino Acid
ACEXXWCANXPXACTGC

SEQ ID NO: 13998 - protein, 17 aa, Artificial Sequence
  Synthetically generated peptide
  VARIANT (1)..(17): Xaa = Any Amino Acid
ACEXXWCANXPAXCTGC

SEQ ID NO: 13999 - protein, 17 aa, Artificial Sequence
  Synthetically generated peptide
  VARIANT (1)..(17): Xaa = Any Amino Acid
ACEXXWCANXPACXTGC

SEQ ID NO: 14000 - protein, 17 aa, Artificial Sequence
  Synthetically generated peptide
  VARIANT (1)..(17): Xaa = Any Amino Acid
ACEXXWCANXPACTXGC

SEQ ID NO: 14001 - protein, 17 aa, Artificial Sequence
  Synthetically generated peptide
  VARIANT (1)..(17): Xaa = Any Amino Acid
ACEXXWCANXPACTGXC

SEQ ID NO: 14002 - protein, 16 aa, Artificial Sequence
  Synthetically generated peptide
  VARIANT (1)..(16): Xaa = Any Amino Acid
ACEXXWCANPXACTGC

SEQ ID NO: 14003 - protein, 17 aa, Artificial Sequence
  Synthetically generated peptide
  VARIANT (1)..(17): Xaa = Any Amino Acid
ACEXXWCANPXXACTGC

SEQ ID NO: 14004 - protein, 17 aa, Artificial Sequence
  Synthetically generated peptide
  VARIANT (1)..(17): Xaa = Any Amino Acid
ACEXXWCANPXAXCTGC

SEQ ID NO: 14005 - protein, 17 aa, Artificial Sequence
  Synthetically generated peptide
  VARIANT (1)..(17): Xaa = Any Amino Acid
ACEXXWCANPXACXTGC

SEQ ID NO: 14006 - protein, 17 aa, Artificial Sequence
  Synthetically generated peptide
  VARIANT (1)..(17): Xaa = Any Amino Acid
ACEXXWCANPXACTXGC

SEQ ID NO: 14007 - protein, 17 aa, Artificial Sequence
  Synthetically generated peptide
  VARIANT (1)..(17): Xaa = Any Amino Acid
ACEXXWCANPXACTGXC

SEQ ID NO: 14008 - protein, 16 aa, Artificial Sequence
  Synthetically generated peptide
  VARIANT (1)..(16): Xaa = Any Amino Acid
ACEXXWCANPAXCTGC

SEQ ID NO: 14009 - protein, 17 aa, Artificial Sequence
  Synthetically generated peptide
  VARIANT (1)..(17): Xaa = Any Amino Acid
ACEXXWCANPAXXCTGC

SEQ ID NO: 14010 - protein, 17 aa, Artificial Sequence
  Synthetically generated peptide
  VARIANT (1)..(17): Xaa = Any Amino Acid
ACEXXWCANPAXCXTGC

SEQ ID NO: 14011 - protein, 17 aa, Artificial Sequence
  Synthetically generated peptide
  VARIANT (1)..(17): Xaa = Any Amino Acid
ACEXXWCANPAXCTXGC

SEQ ID NO: 14012 - protein, 17 aa, Artificial Sequence
  Synthetically generated peptide
  VARIANT (1)..(17): Xaa = Any Amino Acid
ACEXXWCANPAXCTGXC

SEQ ID NO: 14013 - protein, 16 aa, Artificial Sequence
  Synthetically generated peptide
  VARIANT (1)..(16): Xaa = Any Amino Acid
ACEXXWCANPACXTGC

SEQ ID NO: 14014 - protein, 17 aa, Artificial Sequence
  Synthetically generated peptide
  VARIANT (1)..(17): Xaa = Any Amino Acid
ACEXXWCANPACXXTGC

SEQ ID NO: 14015 - protein, 17 aa, Artificial Sequence
  Synthetically generated peptide
  VARIANT (1)..(17): Xaa = Any Amino Acid
ACEXXWCANPACXTXGC

SEQ ID NO: 14016 - protein, 17 aa, Artificial Sequence
  Synthetically generated peptide
  VARIANT (1)..(17): Xaa = Any Amino Acid
ACEXXWCANPACXTGXC

SEQ ID NO: 14017 - protein, 16 aa, Artificial Sequence
  Synthetically generated peptide
  VARIANT (1)..(16): Xaa = Any Amino Acid
ACEXXWCANPACTXGC

SEQ ID NO: 14018 - protein, 17 aa, Artificial Sequence
  Synthetically generated peptide
  VARIANT (1)..(17): Xaa = Any Amino Acid
ACEXXWCANPACTXXGC

SEQ ID NO: 14019 - protein, 17 aa, Artificial Sequence
  Synthetically generated peptide
  VARIANT (1)..(17): Xaa = Any Amino Acid
ACEXXWCANPACTXGXC

SEQ ID NO: 14020 - protein, 16 aa, Artificial Sequence
  Synthetically generated peptide
  VARIANT (1)..(16): Xaa = Any Amino Acid
ACEXXWCANPACTGXC

SEQ ID NO: 14021 - protein, 17 aa, Artificial Sequence
  Synthetically generated peptide
  VARIANT (1)..(17): Xaa = Any Amino Acid
ACEXXWCANPACTGXXC

SEQ ID NO: 14022 - protein, 15 aa, Artificial Sequence
  Synthetically generated peptide
  VARIANT (1)..(15): Xaa = Any Amino Acid
ACEXWXCANPACTGC

SEQ ID NO: 14023 - protein, 16 aa, Artificial Sequence
  Synthetically generated peptide
  VARIANT (1)..(16): Xaa = Any Amino Acid
ACEXWXXCANPACTGC

SEQ ID NO: 14024 - protein, 17 aa, Artificial Sequence
  Synthetically generated peptide
  VARIANT (1)..(17): Xaa = Any Amino Acid
ACEXWXXXCANPACTGC

SEQ ID NO: 14025 - protein, 17 aa, Artificial Sequence
  Synthetically generated peptide
  VARIANT (1)..(17): Xaa = Any Amino Acid
ACEXWXXCAXNPACTGC

SEQ ID NO: 14026 - protein, 17 aa, Artificial Sequence
  Synthetically generated peptide
  VARIANT (1)..(17): Xaa = Any Amino Acid
ACEXWXXCANXPACTGC

SEQ ID NO: 14027 - protein, 17 aa, Artificial Sequence
  Synthetically generated peptide
  VARIANT (1)..(17): Xaa = Any Amino Acid
ACEXWXXCANPXACTGC

SEQ ID NO: 14028 - protein, 17 aa, Artificial Sequence
  Synthetically generated peptide
  VARIANT (1)..(17): Xaa = Any Amino Acid
ACEXWXXCANPAXCTGC

SEQ ID NO: 14029 - protein, 17 aa, Artificial Sequence
  Synthetically generated peptide
  VARIANT (1)..(17): Xaa = Any Amino Acid
ACEXWXXCANPACXTGC

SEQ ID NO: 14030 - protein, 17 aa, Artificial Sequence
  Synthetically generated peptide
  VARIANT (1)..(17): Xaa = Any Amino Acid
ACEXWXXCANPACTXGC

SEQ ID NO: 14031 - protein, 17 aa, Artificial Sequence
  Synthetically generated peptide
  VARIANT (1)..(17): Xaa = Any Amino Acid
ACEXWXXCANPACTGXC

SEQ ID NO: 14032 - protein, 16 aa, Artificial Sequence
  Synthetically generated peptide
  VARIANT (1)..(16): Xaa = Any Amino Acid
ACEXWXCAXNPACTGC

SEQ ID NO: 14033 - protein, 17 aa, Artificial Sequence
  Synthetically generated peptide
  VARIANT (1)..(17): Xaa = Any Amino Acid
ACEXWXCAXXNPACTGC

SEQ ID NO: 14034 - protein, 17 aa, Artificial Sequence
  Synthetically generated peptide
  VARIANT (1)..(17): Xaa = Any Amino Acid
ACEXWXCAXNXPACTGC

SEQ ID NO: 14035 - protein, 17 aa, Artificial Sequence
  Synthetically generated peptide
  VARIANT (1)..(17): Xaa = Any Amino Acid
ACEXWXCAXNPXACTGC

SEQ ID NO: 14036 - protein, 17 aa, Artificial Sequence
  Synthetically generated peptide
  VARIANT (1)..(17): Xaa = Any Amino Acid
ACEXWXCAXNPAXCTGC

SEQ ID NO: 14037 - protein, 17 aa, Artificial Sequence
  Synthetically generated peptide
  VARIANT (1)..(17): Xaa = Any Amino Acid
ACEXWXCAXNPACXTGC

SEQ ID NO: 14038 - protein, 17 aa, Artificial Sequence
  Synthetically generated peptide
  VARIANT (1)..(17): Xaa = Any Amino Acid
ACEXWXCAXNPACTXGC

SEQ ID NO: 14039 - protein, 17 aa, Artificial Sequence
  Synthetically generated peptide
  VARIANT (1)..(17): Xaa = Any Amino Acid
ACEXWXCAXNPACTGXC

SEQ ID NO: 14040 - protein, 16 aa, Artificial Sequence
  Synthetically generated peptide
  VARIANT (1)..(16): Xaa = Any Amino Acid
ACEXWXCANXPACTGC

SEQ ID NO: 14041 - protein, 17 aa, Artificial Sequence
  Synthetically generated peptide
  VARIANT (1)..(17): Xaa = Any Amino Acid
ACEXWXCANXXPACTGC

SEQ ID NO: 14042 - protein, 17 aa, Artificial Sequence
  Synthetically generated peptide
  VARIANT (1)..(17): Xaa = Any Amino Acid
ACEXWXCANXPXACTGC

SEQ ID NO: 14043 - protein, 17 aa, Artificial Sequence
  Synthetically generated peptide
  VARIANT (1)..(17): Xaa = Any Amino Acid
ACEXWXCANXPAXCTGC

SEQ ID NO: 14044 - protein, 17 aa, Artificial Sequence
  Synthetically generated peptide
  VARIANT (1)..(17): Xaa = Any Amino Acid
ACEXWXCANXPACXTGC

SEQ ID NO: 14045 - protein, 17 aa, Artificial Sequence
  Synthetically generated peptide
  VARIANT (1)..(17): Xaa = Any Amino Acid
ACEXWXCANXPACTXGC

SEQ ID NO: 14046 - protein, 17 aa, Artificial Sequence
  Synthetically generated peptide
  VARIANT (1)..(17): Xaa = Any Amino Acid
ACEXWXCANXPACTGXC

SEQ ID NO: 14047 - protein, 16 aa, Artificial Sequence
  Synthetically generated peptide
  VARIANT (1)..(16): Xaa = Any Amino Acid
ACEXWXCANPXACTGC

SEQ ID NO: 14048 - protein, 17 aa, Artificial Sequence
  Synthetically generated peptide
  VARIANT (1)..(17): Xaa = Any Amino Acid
ACEXWXCANPXXACTGC

SEQ ID NO: 14049 - protein, 17 aa, Artificial Sequence
  Synthetically generated peptide
  VARIANT (1)..(17): Xaa = Any Amino Acid
ACEXWXCANPXAXCTGC

SEQ ID NO: 14050 - protein, 17 aa, Artificial Sequence
  Synthetically generated peptide
  VARIANT (1)..(17): Xaa = Any Amino Acid
ACEXWXCANPXACXTGC

SEQ ID NO: 14051 - protein, 17 aa, Artificial Sequence
  Synthetically generated peptide
  VARIANT (1)..(17): Xaa = Any Amino Acid
ACEXWXCANPXACTXGC

SEQ ID NO: 14052 - protein, 17 aa, Artificial Sequence
  Synthetically generated peptide
  VARIANT (1)..(17): Xaa = Any Amino Acid
ACEXWXCANPXACTGXC

SEQ ID NO: 14053 - protein, 16 aa, Artificial Sequence
  Synthetically generated peptide
  VARIANT (1)..(16): Xaa = Any Amino Acid
ACEXWXCANPAXCTGC

SEQ ID NO: 14054 - protein, 17 aa, Artificial Sequence
  Synthetically generated peptide
  VARIANT (1)..(17): Xaa = Any Amino Acid
ACEXWXCANPAXXCTGC

SEQ ID NO: 14055 - protein, 17 aa, Artificial Sequence
  Synthetically generated peptide
  VARIANT (1)..(17): Xaa = Any Amino Acid
ACEXWXCANPAXCXTGC

SEQ ID NO: 14056 - protein, 17 aa, Artificial Sequence
  Synthetically generated peptide
  VARIANT (1)..(17): Xaa = Any Amino Acid
ACEXWXCANPAXCTXGC

SEQ ID NO: 14057 - protein, 17 aa, Artificial Sequence
  Synthetically generated peptide
  VARIANT (1)..(17): Xaa = Any Amino Acid
ACEXWXCANPAXCTGXC

SEQ ID NO: 14058 - protein, 16 aa, Artificial Sequence
  Synthetically generated peptide
  VARIANT (1)..(16): Xaa = Any Amino Acid
ACEXWXCANPACXTGC

SEQ ID NO: 14059 - protein, 17 aa, Artificial Sequence
  Synthetically generated peptide
  VARIANT (1)..(17): Xaa = Any Amino Acid
ACEXWXCANPACXXTGC

SEQ ID NO: 14060 - protein, 17 aa, Artificial Sequence
  Synthetically generated peptide
  VARIANT (1)..(17): Xaa = Any Amino Acid
ACEXWXCANPACXTXGC

SEQ ID NO: 14061 - protein, 17 aa, Artificial Sequence
  Synthetically generated peptide
  VARIANT (1)..(17): Xaa = Any Amino Acid
ACEXWXCANPACXTGXC

SEQ ID NO: 14062 - protein, 16 aa, Artificial Sequence
  Synthetically generated peptide
  VARIANT (1)..(16): Xaa = Any Amino Acid
ACEXWXCANPACTXGC

SEQ ID NO: 14063 - protein, 17 aa, Artificial Sequence
  Synthetically generated peptide
  VARIANT (1)..(17): Xaa = Any Amino Acid
ACEXWXCANPACTXXGC

SEQ ID NO: 14064 - protein, 17 aa, Artificial Sequence
  Synthetically generated peptide
  VARIANT (1)..(17): Xaa = Any Amino Acid
ACEXWXCANPACTXGXC

SEQ ID NO: 14065 - protein, 16 aa, Artificial Sequence
  Synthetically generated peptide
  VARIANT (1)..(16): Xaa = Any Amino Acid
ACEXWXCANPACTGXC

SEQ ID NO: 14066 - protein, 17 aa, Artificial Sequence
  Synthetically generated peptide
  VARIANT (1)..(17): Xaa = Any Amino Acid
ACEXWXCANPACTGXXC

SEQ ID NO: 14067 - protein, 15 aa, Artificial Sequence
  Synthetically generated peptide
  VARIANT (1)..(15): Xaa = Any Amino Acid
ACEXWCAXNPACTGC

SEQ ID NO: 14068 - protein, 16 aa, Artificial Sequence
  Synthetically generated peptide
  VARIANT (1)..(16): Xaa = Any Amino Acid
ACEXWCAXXNPACTGC

SEQ ID NO: 14069 - protein, 17 aa, Artificial Sequence
  Synthetically generated peptide
  VARIANT (1)..(17): Xaa = Any Amino Acid
ACEXWCAXXXNPACTGC

SEQ ID NO: 14070 - protein, 17 aa, Artificial Sequence
  Synthetically generated peptide
  VARIANT (1)..(17): Xaa = Any Amino Acid
ACEXWCAXXNXPACTGC

SEQ ID NO: 14071 - protein, 17 aa, Artificial Sequence
  Synthetically generated peptide
  VARIANT (1)..(17): Xaa = Any Amino Acid
ACEXWCAXXNPXACTGC

SEQ ID NO: 14072 - protein, 17 aa, Artificial Sequence
  Synthetically generated peptide
  VARIANT (1)..(17): Xaa = Any Amino Acid
ACEXWCAXXNPAXCTGC

SEQ ID NO: 14073 - protein, 17 aa, Artificial Sequence
  Synthetically generated peptide
  VARIANT (1)..(17): Xaa = Any Amino Acid
ACEXWCAXXNPACXTGC

SEQ ID NO: 14074 - protein, 17 aa, Artificial Sequence
  Synthetically generated peptide
  VARIANT (1)..(17): Xaa = Any Amino Acid
ACEXWCAXXNPACTXGC

SEQ ID NO: 14075 - protein, 17 aa, Artificial Sequence
  Synthetically generated peptide
  VARIANT (1)..(17): Xaa = Any Amino Acid
ACEXWCAXXNPACTGXC

SEQ ID NO: 14076 - protein, 16 aa, Artificial Sequence
  Synthetically generated peptide
  VARIANT (1)..(16): Xaa = Any Amino Acid
ACEXWCAXNXPACTGC

SEQ ID NO: 14077 - protein, 17 aa, Artificial Sequence
  Synthetically generated peptide
  VARIANT (1)..(17): Xaa = Any Amino Acid
ACEXWCAXNXXPACTGC

SEQ ID NO: 14078 - protein, 17 aa, Artificial Sequence
  Synthetically generated peptide
  VARIANT (1)..(17): Xaa = Any Amino Acid
ACEXWCAXNXPXACTGC

SEQ ID NO: 14079 - protein, 17 aa, Artificial Sequence
  Synthetically generated peptide
  VARIANT (1)..(17): Xaa = Any Amino Acid
ACEXWCAXNXPAXCTGC

SEQ ID NO: 14080 - protein, 17 aa, Artificial Sequence
  Synthetically generated peptide
  VARIANT (1)..(17): Xaa = Any Amino Acid
ACEXWCAXNXPACXTGC

SEQ ID NO: 14081 - protein, 17 aa, Artificial Sequence
  Synthetically generated peptide
  VARIANT (1)..(17): Xaa = Any Amino Acid
ACEXWCAXNXPACTXGC

SEQ ID NO: 14082 - protein, 17 aa, Artificial Sequence
  Synthetically generated peptide
  VARIANT (1)..(17): Xaa = Any Amino Acid
ACEXWCAXNXPACTGXC

SEQ ID NO: 14083 - protein, 16 aa, Artificial Sequence
  Synthetically generated peptide
  VARIANT (1)..(16): Xaa = Any Amino Acid
ACEXWCAXNPXACTGC

SEQ ID NO: 14084 - protein, 17 aa, Artificial Sequence
  Synthetically generated peptide
  VARIANT (1)..(17): Xaa = Any Amino Acid
ACEXWCAXNPXXACTGC

SEQ ID NO: 14085 - protein, 17 aa, Artificial Sequence
  Synthetically generated peptide
  VARIANT (1)..(17): Xaa = Any Amino Acid
ACEXWCAXNPXAXCTGC

SEQ ID NO: 14086 - protein, 17 aa, Artificial Sequence
  Synthetically generated peptide
  VARIANT (1)..(17): Xaa = Any Amino Acid
ACEXWCAXNPXACXTGC

SEQ ID NO: 14087 - protein, 17 aa, Artificial Sequence
  Synthetically generated peptide
  VARIANT (1)..(17): Xaa = Any Amino Acid
ACEXWCAXNPXACTXGC

SEQ ID NO: 14088 - protein, 17 aa, Artificial Sequence
  Synthetically generated peptide
  VARIANT (1)..(17): Xaa = Any Amino Acid
ACEXWCAXNPXACTGXC

SEQ ID NO: 14089 - protein, 16 aa, Artificial Sequence
  Synthetically generated peptide
  VARIANT (1)..(16): Xaa = Any Amino Acid
ACEXWCAXNPAXCTGC

SEQ ID NO: 14090 - protein, 17 aa, Artificial Sequence
  Synthetically generated peptide
  VARIANT (1)..(17): Xaa = Any Amino Acid
ACEXWCAXNPAXXCTGC

SEQ ID NO: 14091 - protein, 17 aa, Artificial Sequence
  Synthetically generated peptide
  VARIANT (1)..(17): Xaa = Any Amino Acid
ACEXWCAXNPAXCXTGC

SEQ ID NO: 14092 - protein, 17 aa, Artificial Sequence
  Synthetically generated peptide
  VARIANT (1)..(17): Xaa = Any Amino Acid
ACEXWCAXNPAXCTXGC

SEQ ID NO: 14093 - protein, 17 aa, Artificial Sequence
  Synthetically generated peptide
  VARIANT (1)..(17): Xaa = Any Amino Acid
ACEXWCAXNPAXCTGXC

SEQ ID NO: 14094 - protein, 16 aa, Artificial Sequence
  Synthetically generated peptide
  VARIANT (1)..(16): Xaa = Any Amino Acid
ACEXWCAXNPACXTGC

SEQ ID NO: 14095 - protein, 17 aa, Artificial Sequence
  Synthetically generated peptide
  VARIANT (1)..(17): Xaa = Any Amino Acid
ACEXWCAXNPACXXTGC

SEQ ID NO: 14096 - protein, 17 aa, Artificial Sequence
  Synthetically generated peptide
  VARIANT (1)..(17): Xaa = Any Amino Acid
ACEXWCAXNPACXTXGC

SEQ ID NO: 14097 - protein, 17 aa, Artificial Sequence
  Synthetically generated peptide
  VARIANT (1)..(17): Xaa = Any Amino Acid
ACEXWCAXNPACXTGXC

SEQ ID NO: 14098 - protein, 16 aa, Artificial Sequence
  Synthetically generated peptide
  VARIANT (1)..(16): Xaa = Any Amino Acid
ACEXWCAXNPACTXGC

SEQ ID NO: 14099 - protein, 17 aa, Artificial Sequence
  Synthetically generated peptide
  VARIANT (1)..(17): Xaa = Any Amino Acid
ACEXWCAXNPACTXXGC

SEQ ID NO: 14100 - protein, 17 aa, Artificial Sequence
  Synthetically generated peptide
  VARIANT (1)..(17): Xaa = Any Amino Acid
ACEXWCAXNPACTXGXC

SEQ ID NO: 14101 - protein, 16 aa, Artificial Sequence
  Synthetically generated peptide
  VARIANT (1)..(16): Xaa = Any Amino Acid
ACEXWCAXNPACTGXC

SEQ ID NO: 14102 - protein, 17 aa, Artificial Sequence
  Synthetically generated peptide
  VARIANT (1)..(17): Xaa = Any Amino Acid
ACEXWCAXNPACTGXXC

SEQ ID NO: 14103 - protein, 15 aa, Artificial Sequence
  Synthetically generated peptide
  VARIANT (1)..(15): Xaa = Any Amino Acid
ACEXWCANXPACTGC

SEQ ID NO: 14104 - protein, 16 aa, Artificial Sequence
  Synthetically generated peptide
  VARIANT (1)..(16): Xaa = Any Amino Acid
ACEXWCANXXPACTGC

SEQ ID NO: 14105 - protein, 17 aa, Artificial Sequence
  Synthetically generated peptide
  VARIANT (1)..(17): Xaa = Any Amino Acid
ACEXWCANXXXPACTGC

SEQ ID NO: 14106 - protein, 17 aa, Artificial Sequence
  Synthetically generated peptide
  VARIANT (1)..(17): Xaa = Any Amino Acid
ACEXWCANXXPXACTGC

SEQ ID NO: 14107 - protein, 17 aa, Artificial Sequence
  Synthetically generated peptide
  VARIANT (1)..(17): Xaa = Any Amino Acid
ACEXWCANXXPAXCTGC

SEQ ID NO: 14108 - protein, 17 aa, Artificial Sequence
  Synthetically generated peptide
  VARIANT (1)..(17): Xaa = Any Amino Acid
ACEXWCANXXPACXTGC

SEQ ID NO: 14109 - protein, 17 aa, Artificial Sequence
  Synthetically generated peptide
  VARIANT (1)..(17): Xaa = Any Amino Acid
ACEXWCANXXPACTXGC

SEQ ID NO: 14110 - protein, 17 aa, Artificial Sequence
  Synthetically generated peptide
  VARIANT (1)..(17): Xaa = Any Amino Acid
ACEXWCANXXPACTGXC

SEQ ID NO: 14111 - protein, 16 aa, Artificial Sequence
  Synthetically generated peptide
  VARIANT (1)..(16): Xaa = Any Amino Acid
ACEXWCANXPXACTGC

SEQ ID NO: 14112 - protein, 17 aa, Artificial Sequence
  Synthetically generated peptide
  VARIANT (1)..(17): Xaa = Any Amino Acid
ACEXWCANXPXXACTGC

SEQ ID NO: 14113 - protein, 17 aa, Artificial Sequence
  Synthetically generated peptide
  VARIANT (1)..(17): Xaa = Any Amino Acid
ACEXWCANXPXAXCTGC

SEQ ID NO: 14114 - protein, 17 aa, Artificial Sequence
  Synthetically generated peptide
  VARIANT (1)..(17): Xaa = Any Amino Acid
ACEXWCANXPXACXTGC

SEQ ID NO: 14115 - protein, 17 aa, Artificial Sequence
  Synthetically generated peptide
  VARIANT (1)..(17): Xaa = Any Amino Acid
ACEXWCANXPXACTXGC

SEQ ID NO: 14116 - protein, 17 aa, Artificial Sequence
  Synthetically generated peptide
  VARIANT (1)..(17): Xaa = Any Amino Acid
ACEXWCANXPXACTGXC

SEQ ID NO: 14117 - protein, 16 aa, Artificial Sequence
  Synthetically generated peptide
  VARIANT (1)..(16): Xaa = Any Amino Acid
ACEXWCANXPAXCTGC

SEQ ID NO: 14118 - protein, 17 aa, Artificial Sequence
  Synthetically generated peptide
  VARIANT (1)..(17): Xaa = Any Amino Acid
ACEXWCANXPAXXCTGC

SEQ ID NO: 14119 - protein, 17 aa, Artificial Sequence
  Synthetically generated peptide
  VARIANT (1)..(17): Xaa = Any Amino Acid
ACEXWCANXPAXCXTGC

SEQ ID NO: 14120 - protein, 17 aa, Artificial Sequence
  Synthetically generated peptide
  VARIANT (1)..(17): Xaa = Any Amino Acid
ACEXWCANXPAXCTXGC

SEQ ID NO: 14121 - protein, 17 aa, Artificial Sequence
  Synthetically generated peptide
  VARIANT (1)..(17): Xaa = Any Amino Acid
ACEXWCANXPAXCTGXC

SEQ ID NO: 14122 - protein, 16 aa, Artificial Sequence
  Synthetically generated peptide
  VARIANT (1)..(16): Xaa = Any Amino Acid
ACEXWCANXPACXTGC

SEQ ID NO: 14123 - protein, 17 aa, Artificial Sequence
  Synthetically generated peptide
  VARIANT (1)..(17): Xaa = Any Amino Acid
ACEXWCANXPACXXTGC

SEQ ID NO: 14124 - protein, 17 aa, Artificial Sequence
  Synthetically generated peptide
  VARIANT (1)..(17): Xaa = Any Amino Acid
ACEXWCANXPACXTXGC

SEQ ID NO: 14125 - protein, 17 aa, Artificial Sequence
  Synthetically generated peptide
  VARIANT (1)..(17): Xaa = Any Amino Acid
ACEXWCANXPACXTGXC

SEQ ID NO: 14126 - protein, 16 aa, Artificial Sequence
  Synthetically generated peptide
  VARIANT (1)..(16): Xaa = Any Amino Acid
ACEXWCANXPACTXGC

SEQ ID NO: 14127 - protein, 17 aa, Artificial Sequence
  Synthetically generated peptide
  VARIANT (1)..(17): Xaa = Any Amino Acid
ACEXWCANXPACTXXGC

SEQ ID NO: 14128 - protein, 17 aa, Artificial Sequence
  Synthetically generated peptide
  VARIANT (1)..(17): Xaa = Any Amino Acid
ACEXWCANXPACTXGXC

SEQ ID NO: 14129 - protein, 16 aa, Artificial Sequence
  Synthetically generated peptide
  VARIANT (1)..(16): Xaa = Any Amino Acid
ACEXWCANXPACTGXC

SEQ ID NO: 14130 - protein, 17 aa, Artificial Sequence
  Synthetically generated peptide
  VARIANT (1)..(17): Xaa = Any Amino Acid
ACEXWCANXPACTGXXC

SEQ ID NO: 14131 - protein, 15 aa, Artificial Sequence
  Synthetically generated peptide
  VARIANT (1)..(15): Xaa = Any Amino Acid
ACEXWCANPXACTGC

SEQ ID NO: 14132 - protein, 16 aa, Artificial Sequence
  Synthetically generated peptide
  VARIANT (1)..(16): Xaa = Any Amino Acid
ACEXWCANPXXACTGC

SEQ ID NO: 14133 - protein, 17 aa, Artificial Sequence
  Synthetically generated peptide
  VARIANT (1)..(17): Xaa = Any Amino Acid
ACEXWCANPXXXACTGC

SEQ ID NO: 14134 - protein, 17 aa, Artificial Sequence
  Synthetically generated peptide
  VARIANT (1)..(17): Xaa = Any Amino Acid
ACEXWCANPXXAXCTGC

SEQ ID NO: 14135 - protein, 17 aa, Artificial Sequence
  Synthetically generated peptide
  VARIANT (1)..(17): Xaa = Any Amino Acid
ACEXWCANPXXACXTGC

SEQ ID NO: 14136 - protein, 17 aa, Artificial Sequence
  Synthetically generated peptide
  VARIANT (1)..(17): Xaa = Any Amino Acid
ACEXWCANPXXACTXGC

SEQ ID NO: 14137 - protein, 17 aa, Artificial Sequence
  Synthetically generated peptide
  VARIANT (1)..(17): Xaa = Any Amino Acid
ACEXWCANPXXACTGXC

SEQ ID NO: 14138 - protein, 16 aa, Artificial Sequence
  Synthetically generated peptide
  VARIANT (1)..(16): Xaa = Any Amino Acid
ACEXWCANPXAXCTGC

SEQ ID NO: 14139 - protein, 17 aa, Artificial Sequence
  Synthetically generated peptide
  VARIANT (1)..(17): Xaa = Any Amino Acid
ACEXWCANPXAXXCTGC

SEQ ID NO: 14140 - protein, 17 aa, Artificial Sequence
  Synthetically generated peptide
  VARIANT (1)..(17): Xaa = Any Amino Acid
ACEXWCANPXAXCXTGC

SEQ ID NO: 14141 - protein, 17 aa, Artificial Sequence
  Synthetically generated peptide
  VARIANT (1)..(17): Xaa = Any Amino Acid
ACEXWCANPXAXCTXGC

SEQ ID NO: 14142 - protein, 17 aa, Artificial Sequence
  Synthetically generated peptide
  VARIANT (1)..(17): Xaa = Any Amino Acid
ACEXWCANPXAXCTGXC

SEQ ID NO: 14143 - protein, 16 aa, Artificial Sequence
  Synthetically generated peptide
  VARIANT (1)..(16): Xaa = Any Amino Acid
ACEXWCANPXACXTGC

SEQ ID NO: 14144 - protein, 17 aa, Artificial Sequence
  Synthetically generated peptide
  VARIANT (1)..(17): Xaa = Any Amino Acid
ACEXWCANPXACXXTGC

SEQ ID NO: 14145 - protein, 17 aa, Artificial Sequence
  Synthetically generated peptide
  VARIANT (1)..(17): Xaa = Any Amino Acid
ACEXWCANPXACXTXGC

SEQ ID NO: 14146 - protein, 17 aa, Artificial Sequence
  Synthetically generated peptide
  VARIANT (1)..(17): Xaa = Any Amino Acid
ACEXWCANPXACXTGXC

SEQ ID NO: 14147 - protein, 16 aa, Artificial Sequence
  Synthetically generated peptide
  VARIANT (1)..(16): Xaa = Any Amino Acid
ACEXWCANPXACTXGC

SEQ ID NO: 14148 - protein, 17 aa, Artificial Sequence
  Synthetically generated peptide
  VARIANT (1)..(17): Xaa = Any Amino Acid
ACEXWCANPXACTXXGC

SEQ ID NO: 14149 - protein, 17 aa, Artificial Sequence
  Synthetically generated peptide
  VARIANT (1)..(17): Xaa = Any Amino Acid
ACEXWCANPXACTXGXC

SEQ ID NO: 14150 - protein, 16 aa, Artificial Sequence
  Synthetically generated peptide
  VARIANT (1)..(16): Xaa = Any Amino Acid
ACEXWCANPXACTGXC

SEQ ID NO: 14151 - protein, 17 aa, Artificial Sequence
  Synthetically generated peptide
  VARIANT (1)..(17): Xaa = Any Amino Acid
ACEXWCANPXACTGXXC

SEQ ID NO: 14152 - protein, 15 aa, Artificial Sequence
  Synthetically generated peptide
  VARIANT (1)..(15): Xaa = Any Amino Acid
ACEXWCANPAXCTGC

SEQ ID NO: 14153 - protein, 16 aa, Artificial Sequence
  Synthetically generated peptide
  VARIANT (1)..(16): Xaa = Any Amino Acid
ACEXWCANPAXXCTGC

SEQ ID NO: 14154 - protein, 17 aa, Artificial Sequence
  Synthetically generated peptide
  VARIANT (1)..(17): Xaa = Any Amino Acid
ACEXWCANPAXXXCTGC

SEQ ID NO: 14155 - protein, 17 aa, Artificial Sequence
  Synthetically generated peptide
  VARIANT (1)..(17): Xaa = Any Amino Acid
ACEXWCANPAXXCXTGC

SEQ ID NO: 14156 - protein, 17 aa, Artificial Sequence
  Synthetically generated peptide
  VARIANT (1)..(17): Xaa = Any Amino Acid
ACEXWCANPAXXCTXGC

SEQ ID NO: 14157 - protein, 17 aa, Artificial Sequence
  Synthetically generated peptide
  VARIANT (1)..(17): Xaa = Any Amino Acid
ACEXWCANPAXXCTGXC

SEQ ID NO: 14158 - protein, 16 aa, Artificial Sequence
  Synthetically generated peptide
  VARIANT (1)..(16): Xaa = Any Amino Acid
ACEXWCANPAXCXTGC

SEQ ID NO: 14159 - protein, 17 aa, Artificial Sequence
  Synthetically generated peptide
  VARIANT (1)..(17): Xaa = Any Amino Acid
ACEXWCANPAXCXXTGC

SEQ ID NO: 14160 - protein, 17 aa, Artificial Sequence
  Synthetically generated peptide
  VARIANT (1)..(17): Xaa = Any Amino Acid
ACEXWCANPAXCXTXGC

SEQ ID NO: 14161 - protein, 17 aa, Artificial Sequence
  Synthetically generated peptide
  VARIANT (1)..(17): Xaa = Any Amino Acid
ACEXWCANPAXCXTGXC

SEQ ID NO: 14162 - protein, 16 aa, Artificial Sequence
  Synthetically generated peptide
  VARIANT (1)..(16): Xaa = Any Amino Acid
ACEXWCANPAXCTXGC

SEQ ID NO: 14163 - protein, 17 aa, Artificial Sequence
  Synthetically generated peptide
  VARIANT (1)..(17): Xaa = Any Amino Acid
ACEXWCANPAXCTXXGC

SEQ ID NO: 14164 - protein, 17 aa, Artificial Sequence
  Synthetically generated peptide
  VARIANT (1)..(17): Xaa = Any Amino Acid
ACEXWCANPAXCTXGXC

SEQ ID NO: 14165 - protein, 16 aa, Artificial Sequence
  Synthetically generated peptide
  VARIANT (1)..(16): Xaa = Any Amino Acid
ACEXWCANPAXCTGXC

SEQ ID NO: 14166 - protein, 17 aa, Artificial Sequence
  Synthetically generated peptide
  VARIANT (1)..(17): Xaa = Any Amino Acid
ACEXWCANPAXCTGXXC

SEQ ID NO: 14167 - protein, 15 aa, Artificial Sequence
  Synthetically generated peptide
  VARIANT (1)..(15): Xaa = Any Amino Acid
ACEXWCANPACXTGC

SEQ ID NO: 14168 - protein, 16 aa, Artificial Sequence
  Synthetically generated peptide
  VARIANT (1)..(16): Xaa = Any Amino Acid
ACEXWCANPACXXTGC

SEQ ID NO: 14169 - protein, 17 aa, Artificial Sequence
  Synthetically generated peptide
  VARIANT (1)..(17): Xaa = Any Amino Acid
ACEXWCANPACXXXTGC

SEQ ID NO: 14170 - protein, 17 aa, Artificial Sequence
  Synthetically generated peptide
  VARIANT (1)..(17): Xaa = Any Amino Acid
ACEXWCANPACXXTXGC

SEQ ID NO: 14171 - protein, 17 aa, Artificial Sequence
  Synthetically generated peptide
  VARIANT (1)..(17): Xaa = Any Amino Acid
ACEXWCANPACXXTGXC

SEQ ID NO: 14172 - protein, 16 aa, Artificial Sequence
  Synthetically generated peptide
  VARIANT (1)..(16): Xaa = Any Amino Acid
ACEXWCANPACXTXGC

SEQ ID NO: 14173 - protein, 17 aa, Artificial Sequence
  Synthetically generated peptide
  VARIANT (1)..(17): Xaa = Any Amino Acid
ACEXWCANPACXTXXGC

SEQ ID NO: 14174 - protein, 17 aa, Artificial Sequence
  Synthetically generated peptide
  VARIANT (1)..(17): Xaa = Any Amino Acid
ACEXWCANPACXTXGXC

SEQ ID NO: 14175 - protein, 16 aa, Artificial Sequence
  Synthetically generated peptide
  VARIANT (1)..(16): Xaa = Any Amino Acid
ACEXWCANPACXTGXC

SEQ ID NO: 14176 - protein, 17 aa, Artificial Sequence
  Synthetically generated peptide
  VARIANT (1)..(17): Xaa = Any Amino Acid
ACEXWCANPACXTGXXC

SEQ ID NO: 14177 - protein, 15 aa, Artificial Sequence
  Synthetically generated peptide
  VARIANT (1)..(15): Xaa = Any Amino Acid
ACEXWCANPACTXGC

SEQ ID NO: 14178 - protein, 16 aa, Artificial Sequence
  Synthetically generated peptide
  VARIANT (1)..(16): Xaa = Any Amino Acid
ACEXWCANPACTXXGC

SEQ ID NO: 14179 - protein, 17 aa, Artificial Sequence
  Synthetically generated peptide
  VARIANT (1)..(17): Xaa = Any Amino Acid
ACEXWCANPACTXXXGC

SEQ ID NO: 14180 - protein, 17 aa, Artificial Sequence
  Synthetically generated peptide
  VARIANT (1)..(17): Xaa = Any Amino Acid
ACEXWCANPACTXXGXC

SEQ ID NO: 14181 - protein, 16 aa, Artificial Sequence
  Synthetically generated peptide
  VARIANT (1)..(16): Xaa = Any Amino Acid
ACEXWCANPACTXGXC

SEQ ID NO: 14182 - protein, 17 aa, Artificial Sequence
  Synthetically generated peptide
  VARIANT (1)..(17): Xaa = Any Amino Acid
ACEXWCANPACTXGXXC

SEQ ID NO: 14183 - protein, 15 aa, Artificial Sequence
  Synthetically generated peptide
  VARIANT (1)..(15): Xaa = Any Amino Acid
ACEXWCANPACTGXC

SEQ ID NO: 14184 - protein, 16 aa, Artificial Sequence
  Synthetically generated peptide
  VARIANT (1)..(16): Xaa = Any Amino Acid
ACEXWCANPACTGXXC

SEQ ID NO: 14185 - protein, 17 aa, Artificial Sequence
  Synthetically generated peptide
  VARIANT (1)..(17): Xaa = Any Amino Acid
ACEXWCANPACTGXXXC

SEQ ID NO: 14186 - protein, 14 aa, Artificial Sequence
  Synthetically generated peptide
  VARIANT (1)..(14): Xaa = Any Amino Acid
ACEWXCANPACTGC

SEQ ID NO: 14187 - protein, 15 aa, Artificial Sequence
  Synthetically generated peptide
  VARIANT (1)..(15): Xaa = Any Amino Acid
ACEWXXCANPACTGC

SEQ ID NO: 14188 - protein, 16 aa, Artificial Sequence
  Synthetically generated peptide
  VARIANT (1)..(16): Xaa = Any Amino Acid
ACEWXXXCANPACTGC

SEQ ID NO: 14189 - protein, 17 aa, Artificial Sequence
  Synthetically generated peptide
  VARIANT (1)..(17): Xaa = Any Amino Acid
ACEWXXXXCANPACTGC

SEQ ID NO: 14190 - protein, 17 aa, Artificial Sequence
  Synthetically generated peptide
  VARIANT (1)..(17): Xaa = Any Amino Acid
ACEWXXXCAXNPACTGC

SEQ ID NO: 14191 - protein, 17 aa, Artificial Sequence
  Synthetically generated peptide
  VARIANT (1)..(17): Xaa = Any Amino Acid
ACEWXXXCANXPACTGC

SEQ ID NO: 14192 - protein, 17 aa, Artificial Sequence
  Synthetically generated peptide
  VARIANT (1)..(17): Xaa = Any Amino Acid
ACEWXXXCANPXACTGC

SEQ ID NO: 14193 - protein, 17 aa, Artificial Sequence
  Synthetically generated peptide
  VARIANT (1)..(17): Xaa = Any Amino Acid
ACEWXXXCANPAXCTGC

SEQ ID NO: 14194 - protein, 17 aa, Artificial Sequence
  Synthetically generated peptide
  VARIANT (1)..(17): Xaa = Any Amino Acid
ACEWXXXCANPACXTGC

SEQ ID NO: 14195 - protein, 17 aa, Artificial Sequence
  Synthetically generated peptide
  VARIANT (1)..(17): Xaa = Any Amino Acid
ACEWXXXCANPACTXGC

SEQ ID NO: 14196 - protein, 17 aa, Artificial Sequence
  Synthetically generated peptide
  VARIANT (1)..(17): Xaa = Any Amino Acid
ACEWXXXCANPACTGXC

SEQ ID NO: 14197 - protein, 16 aa, Artificial Sequence
  Synthetically generated peptide
  VARIANT (1)..(16): Xaa = Any Amino Acid
ACEWXXCAXNPACTGC

SEQ ID NO: 14198 - protein, 17 aa, Artificial Sequence
  Synthetically generated peptide
  VARIANT (1)..(17): Xaa = Any Amino Acid
ACEWXXCAXXNPACTGC

SEQ ID NO: 14199 - protein, 17 aa, Artificial Sequence
  Synthetically generated peptide
  VARIANT (1)..(17): Xaa = Any Amino Acid
ACEWXXCAXNXPACTGC

SEQ ID NO: 14200 - protein, 17 aa, Artificial Sequence
  Synthetically generated peptide
  VARIANT (1)..(17): Xaa = Any Amino Acid
ACEWXXCAXNPXACTGC

SEQ ID NO: 14201 - protein, 17 aa, Artificial Sequence
  Synthetically generated peptide
  VARIANT (1)..(17): Xaa = Any Amino Acid
ACEWXXCAXNPAXCTGC

SEQ ID NO: 14202 - protein, 17 aa, Artificial Sequence
  Synthetically generated peptide
  VARIANT (1)..(17): Xaa = Any Amino Acid
ACEWXXCAXNPACXTGC

SEQ ID NO: 14203 - protein, 17 aa, Artificial Sequence
  Synthetically generated peptide
  VARIANT (1)..(17): Xaa = Any Amino Acid
ACEWXXCAXNPACTXGC

SEQ ID NO: 14204 - protein, 17 aa, Artificial Sequence
  Synthetically generated peptide
  VARIANT (1)..(17): Xaa = Any Amino Acid
ACEWXXCAXNPACTGXC

SEQ ID NO: 14205 - protein, 16 aa, Artificial Sequence
  Synthetically generated peptide
  VARIANT (1)..(16): Xaa = Any Amino Acid
ACEWXXCANXPACTGC

SEQ ID NO: 14206 - protein, 17 aa, Artificial Sequence
  Synthetically generated peptide
  VARIANT (1)..(17): Xaa = Any Amino Acid
ACEWXXCANXXPACTGC

SEQ ID NO: 14207 - protein, 17 aa, Artificial Sequence
  Synthetically generated peptide
  VARIANT (1)..(17): Xaa = Any Amino Acid
ACEWXXCANXPXACTGC

SEQ ID NO: 14208 - protein, 17 aa, Artificial Sequence
  Synthetically generated peptide
  VARIANT (1)..(17): Xaa = Any Amino Acid
ACEWXXCANXPAXCTGC

SEQ ID NO: 14209 - protein, 17 aa, Artificial Sequence
  Synthetically generated peptide
  VARIANT (1)..(17): Xaa = Any Amino Acid
ACEWXXCANXPACXTGC

SEQ ID NO: 14210 - protein, 17 aa, Artificial Sequence
  Synthetically generated peptide
  VARIANT (1)..(17): Xaa = Any Amino Acid
ACEWXXCANXPACTXGC

SEQ ID NO: 14211 - protein, 17 aa, Artificial Sequence
  Synthetically generated peptide
  VARIANT (1)..(17): Xaa = Any Amino Acid
ACEWXXCANXPACTGXC

SEQ ID NO: 14212 - protein, 16 aa, Artificial Sequence
  Synthetically generated peptide
  VARIANT (1)..(16): Xaa = Any Amino Acid
ACEWXXCANPXACTGC

SEQ ID NO: 14213 - protein, 17 aa, Artificial Sequence
  Synthetically generated peptide
  VARIANT (1)..(17): Xaa = Any Amino Acid
ACEWXXCANPXXACTGC

SEQ ID NO: 14214 - protein, 17 aa, Artificial Sequence
  Synthetically generated peptide
  VARIANT (1)..(17): Xaa = Any Amino Acid
ACEWXXCANPXAXCTGC

SEQ ID NO: 14215 - protein, 17 aa, Artificial Sequence
  Synthetically generated peptide
  VARIANT (1)..(17): Xaa = Any Amino Acid
ACEWXXCANPXACXTGC

SEQ ID NO: 14216 - protein, 17 aa, Artificial Sequence
  Synthetically generated peptide
  VARIANT (1)..(17): Xaa = Any Amino Acid
ACEWXXCANPXACTXGC

SEQ ID NO: 14217 - protein, 17 aa, Artificial Sequence
  Synthetically generated peptide
  VARIANT (1)..(17): Xaa = Any Amino Acid
ACEWXXCANPXACTGXC

SEQ ID NO: 14218 - protein, 16 aa, Artificial Sequence
  Synthetically generated peptide
  VARIANT (1)..(16): Xaa = Any Amino Acid
ACEWXXCANPAXCTGC

SEQ ID NO: 14219 - protein, 17 aa, Artificial Sequence
  Synthetically generated peptide
  VARIANT (1)..(17): Xaa = Any Amino Acid
ACEWXXCANPAXXCTGC

SEQ ID NO: 14220 - protein, 17 aa, Artificial Sequence
  Synthetically generated peptide
  VARIANT (1)..(17): Xaa = Any Amino Acid
ACEWXXCANPAXCXTGC

SEQ ID NO: 14221 - protein, 17 aa, Artificial Sequence
  Synthetically generated peptide
  VARIANT (1)..(17): Xaa = Any Amino Acid
ACEWXXCANPAXCTXGC

SEQ ID NO: 14222 - protein, 17 aa, Artificial Sequence
  Synthetically generated peptide
  VARIANT (1)..(17): Xaa = Any Amino Acid
ACEWXXCANPAXCTGXC

SEQ ID NO: 14223 - protein, 16 aa, Artificial Sequence
  Synthetically generated peptide
  VARIANT (1)..(16): Xaa = Any Amino Acid
ACEWXXCANPACXTGC

SEQ ID NO: 14224 - protein, 17 aa, Artificial Sequence
  Synthetically generated peptide
  VARIANT (1)..(17): Xaa = Any Amino Acid
ACEWXXCANPACXXTGC

SEQ ID NO: 14225 - protein, 17 aa, Artificial Sequence
  Synthetically generated peptide
  VARIANT (1)..(17): Xaa = Any Amino Acid
ACEWXXCANPACXTXGC

SEQ ID NO: 14226 - protein, 17 aa, Artificial Sequence
  Synthetically generated peptide
  VARIANT (1)..(17): Xaa = Any Amino Acid
ACEWXXCANPACXTGXC

SEQ ID NO: 14227 - protein, 16 aa, Artificial Sequence
  Synthetically generated peptide
  VARIANT (1)..(16): Xaa = Any Amino Acid
ACEWXXCANPACTXGC

SEQ ID NO: 14228 - protein, 17 aa, Artificial Sequence
  Synthetically generated peptide
  VARIANT (1)..(17): Xaa = Any Amino Acid
ACEWXXCANPACTXXGC

SEQ ID NO: 14229 - protein, 17 aa, Artificial Sequence
  Synthetically generated peptide
  VARIANT (1)..(17): Xaa = Any Amino Acid
ACEWXXCANPACTXGXC

SEQ ID NO: 14230 - protein, 16 aa, Artificial Sequence
  Synthetically generated peptide
  VARIANT (1)..(16): Xaa = Any Amino Acid
ACEWXXCANPACTGXC

SEQ ID NO: 14231 - protein, 17 aa, Artificial Sequence
  Synthetically generated peptide
  VARIANT (1)..(17): Xaa = Any Amino Acid
ACEWXXCANPACTGXXC

SEQ ID NO: 14232 - protein, 15 aa, Artificial Sequence
  Synthetically generated peptide
  VARIANT (1)..(15): Xaa = Any Amino Acid
ACEWXCAXNPACTGC

SEQ ID NO: 14233 - protein, 16 aa, Artificial Sequence
  Synthetically generated peptide
  VARIANT (1)..(16): Xaa = Any Amino Acid
ACEWXCAXXNPACTGC

SEQ ID NO: 14234 - protein, 17 aa, Artificial Sequence
  Synthetically generated peptide
  VARIANT (1)..(17): Xaa = Any Amino Acid
ACEWXCAXXXNPACTGC

SEQ ID NO: 14235 - protein, 17 aa, Artificial Sequence
  Synthetically generated peptide
  VARIANT (1)..(17): Xaa = Any Amino Acid
ACEWXCAXXNXPACTGC

SEQ ID NO: 14236 - protein, 17 aa, Artificial Sequence
  Synthetically generated peptide
  VARIANT (1)..(17): Xaa = Any Amino Acid
ACEWXCAXXNPXACTGC

SEQ ID NO: 14237 - protein, 17 aa, Artificial Sequence
  Synthetically generated peptide
  VARIANT (1)..(17): Xaa = Any Amino Acid
ACEWXCAXXNPAXCTGC

SEQ ID NO: 14238 - protein, 17 aa, Artificial Sequence
  Synthetically generated peptide
  VARIANT (1)..(17): Xaa = Any Amino Acid
ACEWXCAXXNPACXTGC

SEQ ID NO: 14239 - protein, 17 aa, Artificial Sequence
  Synthetically generated peptide
  VARIANT (1)..(17): Xaa = Any Amino Acid
ACEWXCAXXNPACTXGC

SEQ ID NO: 14240 - protein, 17 aa, Artificial Sequence
  Synthetically generated peptide
  VARIANT (1)..(17): Xaa = Any Amino Acid
ACEWXCAXXNPACTGXC

SEQ ID NO: 14241 - protein, 16 aa, Artificial Sequence
  Synthetically generated peptide
  VARIANT (1)..(16): Xaa = Any Amino Acid
ACEWXCAXNXPACTGC

SEQ ID NO: 14242 - protein, 17 aa, Artificial Sequence
  Synthetically generated peptide
  VARIANT (1)..(17): Xaa = Any Amino Acid
ACEWXCAXNXXPACTGC

SEQ ID NO: 14243 - protein, 17 aa, Artificial Sequence
  Synthetically generated peptide
  VARIANT (1)..(17): Xaa = Any Amino Acid
ACEWXCAXNXPXACTGC

SEQ ID NO: 14244 - protein, 17 aa, Artificial Sequence
  Synthetically generated peptide
  VARIANT (1)..(17): Xaa = Any Amino Acid
ACEWXCAXNXPAXCTGC

SEQ ID NO: 14245 - protein, 17 aa, Artificial Sequence
  Synthetically generated peptide
  VARIANT (1)..(17): Xaa = Any Amino Acid
ACEWXCAXNXPACXTGC

SEQ ID NO: 14246 - protein, 17 aa, Artificial Sequence
  Synthetically generated peptide
  VARIANT (1)..(17): Xaa = Any Amino Acid
ACEWXCAXNXPACTXGC

SEQ ID NO: 14247 - protein, 17 aa, Artificial Sequence
  Synthetically generated peptide
  VARIANT (1)..(17): Xaa = Any Amino Acid
ACEWXCAXNXPACTGXC

SEQ ID NO: 14248 - protein, 16 aa, Artificial Sequence
  Synthetically generated peptide
  VARIANT (1)..(16): Xaa = Any Amino Acid
ACEWXCAXNPXACTGC

SEQ ID NO: 14249 - protein, 17 aa, Artificial Sequence
  Synthetically generated peptide
  VARIANT (1)..(17): Xaa = Any Amino Acid
ACEWXCAXNPXXACTGC

SEQ ID NO: 14250 - protein, 17 aa, Artificial Sequence
  Synthetically generated peptide
  VARIANT (1)..(17): Xaa = Any Amino Acid
ACEWXCAXNPXAXCTGC

SEQ ID NO: 14251 - protein, 17 aa, Artificial Sequence
  Synthetically generated peptide
  VARIANT (1)..(17): Xaa = Any Amino Acid
ACEWXCAXNPXACXTGC

SEQ ID NO: 14252 - protein, 17 aa, Artificial Sequence
  Synthetically generated peptide
  VARIANT (1)..(17): Xaa = Any Amino Acid
ACEWXCAXNPXACTXGC

SEQ ID NO: 14253 - protein, 17 aa, Artificial Sequence
  Synthetically generated peptide
  VARIANT (1)..(17): Xaa = Any Amino Acid
ACEWXCAXNPXACTGXC

SEQ ID NO: 14254 - protein, 16 aa, Artificial Sequence
  Synthetically generated peptide
  VARIANT (1)..(16): Xaa = Any Amino Acid
ACEWXCAXNPAXCTGC

SEQ ID NO: 14255 - protein, 17 aa, Artificial Sequence
  Synthetically generated peptide
  VARIANT (1)..(17): Xaa = Any Amino Acid
ACEWXCAXNPAXXCTGC

SEQ ID NO: 14256 - protein, 17 aa, Artificial Sequence
  Synthetically generated peptide
  VARIANT (1)..(17): Xaa = Any Amino Acid
ACEWXCAXNPAXCXTGC

SEQ ID NO: 14257 - protein, 17 aa, Artificial Sequence
  Synthetically generated peptide
  VARIANT (1)..(17): Xaa = Any Amino Acid
ACEWXCAXNPAXCTXGC

SEQ ID NO: 14258 - protein, 17 aa, Artificial Sequence
  Synthetically generated peptide
  VARIANT (1)..(17): Xaa = Any Amino Acid
ACEWXCAXNPAXCTGXC

SEQ ID NO: 14259 - protein, 16 aa, Artificial Sequence
  Synthetically generated peptide
  VARIANT (1)..(16): Xaa = Any Amino Acid
ACEWXCAXNPACXTGC

SEQ ID NO: 14260 - protein, 17 aa, Artificial Sequence
  Synthetically generated peptide
  VARIANT (1)..(17): Xaa = Any Amino Acid
ACEWXCAXNPACXXTGC

SEQ ID NO: 14261 - protein, 17 aa, Artificial Sequence
  Synthetically generated peptide
  VARIANT (1)..(17): Xaa = Any Amino Acid
ACEWXCAXNPACXTXGC

SEQ ID NO: 14262 - protein, 17 aa, Artificial Sequence
  Synthetically generated peptide
  VARIANT (1)..(17): Xaa = Any Amino Acid
ACEWXCAXNPACXTGXC

SEQ ID NO: 14263 - protein, 16 aa, Artificial Sequence
  Synthetically generated peptide
  VARIANT (1)..(16): Xaa = Any Amino Acid
ACEWXCAXNPACTXGC

SEQ ID NO: 14264 - protein, 17 aa, Artificial Sequence
  Synthetically generated peptide
  VARIANT (1)..(17): Xaa = Any Amino Acid
ACEWXCAXNPACTXXGC

SEQ ID NO: 14265 - protein, 17 aa, Artificial Sequence
  Synthetically generated peptide
  VARIANT (1)..(17): Xaa = Any Amino Acid
ACEWXCAXNPACTXGXC

SEQ ID NO: 14266 - protein, 16 aa, Artificial Sequence
  Synthetically generated peptide
  VARIANT (1)..(16): Xaa = Any Amino Acid
ACEWXCAXNPACTGXC

SEQ ID NO: 14267 - protein, 17 aa, Artificial Sequence
  Synthetically generated peptide
  VARIANT (1)..(17): Xaa = Any Amino Acid
ACEWXCAXNPACTGXXC

SEQ ID NO: 14268 - protein, 15 aa, Artificial Sequence
  Synthetically generated peptide
  VARIANT (1)..(15): Xaa = Any Amino Acid
ACEWXCANXPACTGC

SEQ ID NO: 14269 - protein, 16 aa, Artificial Sequence
  Synthetically generated peptide
  VARIANT (1)..(16): Xaa = Any Amino Acid
ACEWXCANXXPACTGC

SEQ ID NO: 14270 - protein, 17 aa, Artificial Sequence
  Synthetically generated peptide
  VARIANT (1)..(17): Xaa = Any Amino Acid
ACEWXCANXXXPACTGC

SEQ ID NO: 14271 - protein, 17 aa, Artificial Sequence
  Synthetically generated peptide
  VARIANT (1)..(17): Xaa = Any Amino Acid
ACEWXCANXXPXACTGC

SEQ ID NO: 14272 - protein, 17 aa, Artificial Sequence
  Synthetically generated peptide
  VARIANT (1)..(17): Xaa = Any Amino Acid
ACEWXCANXXPAXCTGC

SEQ ID NO: 14273 - protein, 17 aa, Artificial Sequence
  Synthetically generated peptide
  VARIANT (1)..(17): Xaa = Any Amino Acid
ACEWXCANXXPACXTGC

SEQ ID NO: 14274 - protein, 17 aa, Artificial Sequence
  Synthetically generated peptide
  VARIANT (1)..(17): Xaa = Any Amino Acid
ACEWXCANXXPACTXGC

SEQ ID NO: 14275 - protein, 17 aa, Artificial Sequence
  Synthetically generated peptide
  VARIANT (1)..(17): Xaa = Any Amino Acid
ACEWXCANXXPACTGXC

SEQ ID NO: 14276 - protein, 16 aa, Artificial Sequence
  Synthetically generated peptide
  VARIANT (1)..(16): Xaa = Any Amino Acid
ACEWXCANXPXACTGC

SEQ ID NO: 14277 - protein, 17 aa, Artificial Sequence
  Synthetically generated peptide
  VARIANT (1)..(17): Xaa = Any Amino Acid
ACEWXCANXPXXACTGC

SEQ ID NO: 14278 - protein, 17 aa, Artificial Sequence
  Synthetically generated peptide
  VARIANT (1)..(17): Xaa = Any Amino Acid
ACEWXCANXPXAXCTGC

SEQ ID NO: 14279 - protein, 17 aa, Artificial Sequence
  Synthetically generated peptide
  VARIANT (1)..(17): Xaa = Any Amino Acid
ACEWXCANXPXACXTGC

SEQ ID NO: 14280 - protein, 17 aa, Artificial Sequence
  Synthetically generated peptide
  VARIANT (1)..(17): Xaa = Any Amino Acid
ACEWXCANXPXACTXGC

SEQ ID NO: 14281 - protein, 17 aa, Artificial Sequence
  Synthetically generated peptide
  VARIANT (1)..(17): Xaa = Any Amino Acid
ACEWXCANXPXACTGXC

SEQ ID NO: 14282 - protein, 16 aa, Artificial Sequence
  Synthetically generated peptide
  VARIANT (1)..(16): Xaa = Any Amino Acid
ACEWXCANXPAXCTGC

SEQ ID NO: 14283 - protein, 17 aa, Artificial Sequence
  Synthetically generated peptide
  VARIANT (1)..(17): Xaa = Any Amino Acid
ACEWXCANXPAXXCTGC

SEQ ID NO: 14284 - protein, 17 aa, Artificial Sequence
  Synthetically generated peptide
  VARIANT (1)..(17): Xaa = Any Amino Acid
ACEWXCANXPAXCXTGC

SEQ ID NO: 14285 - protein, 17 aa, Artificial Sequence
  Synthetically generated peptide
  VARIANT (1)..(17): Xaa = Any Amino Acid
ACEWXCANXPAXCTXGC

SEQ ID NO: 14286 - protein, 17 aa, Artificial Sequence
  Synthetically generated peptide
  VARIANT (1)..(17): Xaa = Any Amino Acid
ACEWXCANXPAXCTGXC

SEQ ID NO: 14287 - protein, 16 aa, Artificial Sequence
  Synthetically generated peptide
  VARIANT (1)..(16): Xaa = Any Amino Acid
ACEWXCANXPACXTGC

SEQ ID NO: 14288 - protein, 17 aa, Artificial Sequence
  Synthetically generated peptide
  VARIANT (1)..(17): Xaa = Any Amino Acid
ACEWXCANXPACXXTGC

SEQ ID NO: 14289 - protein, 17 aa, Artificial Sequence
  Synthetically generated peptide
  VARIANT (1)..(17): Xaa = Any Amino Acid
ACEWXCANXPACXTXGC

SEQ ID NO: 14290 - protein, 17 aa, Artificial Sequence
  Synthetically generated peptide
  VARIANT (1)..(17): Xaa = Any Amino Acid
ACEWXCANXPACXTGXC

SEQ ID NO: 14291 - protein, 16 aa, Artificial Sequence
  Synthetically generated peptide
  VARIANT (1)..(16): Xaa = Any Amino Acid
ACEWXCANXPACTXGC

SEQ ID NO: 14292 - protein, 17 aa, Artificial Sequence
  Synthetically generated peptide
  VARIANT (1)..(17): Xaa = Any Amino Acid
ACEWXCANXPACTXXGC

SEQ ID NO: 14293 - protein, 17 aa, Artificial Sequence
  Synthetically generated peptide
  VARIANT (1)..(17): Xaa = Any Amino Acid
ACEWXCANXPACTXGXC

SEQ ID NO: 14294 - protein, 16 aa, Artificial Sequence
  Synthetically generated peptide
  VARIANT (1)..(16): Xaa = Any Amino Acid
ACEWXCANXPACTGXC

SEQ ID NO: 14295 - protein, 17 aa, Artificial Sequence
  Synthetically generated peptide
  VARIANT (1)..(17): Xaa = Any Amino Acid
ACEWXCANXPACTGXXC

SEQ ID NO: 14296 - protein, 15 aa, Artificial Sequence
  Synthetically generated peptide
  VARIANT (1)..(15): Xaa = Any Amino Acid
ACEWXCANPXACTGC

SEQ ID NO: 14297 - protein, 16 aa, Artificial Sequence
  Synthetically generated peptide
  VARIANT (1)..(16): Xaa = Any Amino Acid
ACEWXCANPXXACTGC

SEQ ID NO: 14298 - protein, 17 aa, Artificial Sequence
  Synthetically generated peptide
  VARIANT (1)..(17): Xaa = Any Amino Acid
ACEWXCANPXXXACTGC

SEQ ID NO: 14299 - protein, 17 aa, Artificial Sequence
  Synthetically generated peptide
  VARIANT (1)..(17): Xaa = Any Amino Acid
ACEWXCANPXXAXCTGC

SEQ ID NO: 14300 - protein, 17 aa, Artificial Sequence
  Synthetically generated peptide
  VARIANT (1)..(17): Xaa = Any Amino Acid
ACEWXCANPXXACXTGC

SEQ ID NO: 14301 - protein, 17 aa, Artificial Sequence
  Synthetically generated peptide
  VARIANT (1)..(17): Xaa = Any Amino Acid
ACEWXCANPXXACTXGC

SEQ ID NO: 14302 - protein, 17 aa, Artificial Sequence
  Synthetically generated peptide
  VARIANT (1)..(17): Xaa = Any Amino Acid
ACEWXCANPXXACTGXC

SEQ ID NO: 14303 - protein, 16 aa, Artificial Sequence
  Synthetically generated peptide
  VARIANT (1)..(16): Xaa = Any Amino Acid
ACEWXCANPXAXCTGC

SEQ ID NO: 14304 - protein, 17 aa, Artificial Sequence
  Synthetically generated peptide
  VARIANT (1)..(17): Xaa = Any Amino Acid
ACEWXCANPXAXXCTGC

SEQ ID NO: 14305 - protein, 17 aa, Artificial Sequence
  Synthetically generated peptide
  VARIANT (1)..(17): Xaa = Any Amino Acid
ACEWXCANPXAXCXTGC

SEQ ID NO: 14306 - protein, 17 aa, Artificial Sequence
  Synthetically generated peptide
  VARIANT (1)..(17): Xaa = Any Amino Acid
ACEWXCANPXAXCTXGC

SEQ ID NO: 14307 - protein, 17 aa, Artificial Sequence
  Synthetically generated peptide
  VARIANT (1)..(17): Xaa = Any Amino Acid
ACEWXCANPXAXCTGXC

SEQ ID NO: 14308 - protein, 16 aa, Artificial Sequence
  Synthetically generated peptide
  VARIANT (1)..(16): Xaa = Any Amino Acid
ACEWXCANPXACXTGC

SEQ ID NO: 14309 - protein, 17 aa, Artificial Sequence
  Synthetically generated peptide
  VARIANT (1)..(17): Xaa = Any Amino Acid
ACEWXCANPXACXXTGC

SEQ ID NO: 14310 - protein, 17 aa, Artificial Sequence
  Synthetically generated peptide
  VARIANT (1)..(17): Xaa = Any Amino Acid
ACEWXCANPXACXTXGC

SEQ ID NO: 14311 - protein, 17 aa, Artificial Sequence
  Synthetically generated peptide
  VARIANT (1)..(17): Xaa = Any Amino Acid
ACEWXCANPXACXTGXC

SEQ ID NO: 14312 - protein, 16 aa, Artificial Sequence
  Synthetically generated peptide
  VARIANT (1)..(16): Xaa = Any Amino Acid
ACEWXCANPXACTXGC

SEQ ID NO: 14313 - protein, 17 aa, Artificial Sequence
  Synthetically generated peptide
  VARIANT (1)..(17): Xaa = Any Amino Acid
ACEWXCANPXACTXXGC

SEQ ID NO: 14314 - protein, 17 aa, Artificial Sequence
  Synthetically generated peptide
  VARIANT (1)..(17): Xaa = Any Amino Acid
ACEWXCANPXACTXGXC

SEQ ID NO: 14315 - protein, 16 aa, Artificial Sequence
  Synthetically generated peptide
  VARIANT (1)..(16): Xaa = Any Amino Acid
ACEWXCANPXACTGXC

SEQ ID NO: 14316 - protein, 17 aa, Artificial Sequence
  Synthetically generated peptide
  VARIANT (1)..(17): Xaa = Any Amino Acid
ACEWXCANPXACTGXXC

SEQ ID NO: 14317 - protein, 15 aa, Artificial Sequence
  Synthetically generated peptide
  VARIANT (1)..(15): Xaa = Any Amino Acid
ACEWXCANPAXCTGC

SEQ ID NO: 14318 - protein, 16 aa, Artificial Sequence
  Synthetically generated peptide
  VARIANT (1)..(16): Xaa = Any Amino Acid
ACEWXCANPAXXCTGC

SEQ ID NO: 14319 - protein, 17 aa, Artificial Sequence
  Synthetically generated peptide
  VARIANT (1)..(17): Xaa = Any Amino Acid
ACEWXCANPAXXXCTGC

SEQ ID NO: 14320 - protein, 17 aa, Artificial Sequence
  Synthetically generated peptide
  VARIANT (1)..(17): Xaa = Any Amino Acid
ACEWXCANPAXXCXTGC

SEQ ID NO: 14321 - protein, 17 aa, Artificial Sequence
  Synthetically generated peptide
  VARIANT (1)..(17): Xaa = Any Amino Acid
ACEWXCANPAXXCTXGC

SEQ ID NO: 14322 - protein, 17 aa, Artificial Sequence
  Synthetically generated peptide
  VARIANT (1)..(17): Xaa = Any Amino Acid
ACEWXCANPAXXCTGXC

SEQ ID NO: 14323 - protein, 16 aa, Artificial Sequence
  Synthetically generated peptide
  VARIANT (1)..(16): Xaa = Any Amino Acid
ACEWXCANPAXCXTGC

SEQ ID NO: 14324 - protein, 17 aa, Artificial Sequence
  Synthetically generated peptide
  VARIANT (1)..(17): Xaa = Any Amino Acid
ACEWXCANPAXCXXTGC

SEQ ID NO: 14325 - protein, 17 aa, Artificial Sequence
  Synthetically generated peptide
  VARIANT (1)..(17): Xaa = Any Amino Acid
ACEWXCANPAXCXTXGC

SEQ ID NO: 14326 - protein, 17 aa, Artificial Sequence
  Synthetically generated peptide
  VARIANT (1)..(17): Xaa = Any Amino Acid
ACEWXCANPAXCXTGXC

SEQ ID NO: 14327 - protein, 16 aa, Artificial Sequence
  Synthetically generated peptide
  VARIANT (1)..(16): Xaa = Any Amino Acid
ACEWXCANPAXCTXGC

SEQ ID NO: 14328 - protein, 17 aa, Artificial Sequence
  Synthetically generated peptide
  VARIANT (1)..(17): Xaa = Any Amino Acid
ACEWXCANPAXCTXXGC

SEQ ID NO: 14329 - protein, 17 aa, Artificial Sequence
  Synthetically generated peptide
  VARIANT (1)..(17): Xaa = Any Amino Acid
ACEWXCANPAXCTXGXC

SEQ ID NO: 14330 - protein, 16 aa, Artificial Sequence
  Synthetically generated peptide
  VARIANT (1)..(16): Xaa = Any Amino Acid
ACEWXCANPAXCTGXC

SEQ ID NO: 14331 - protein, 17 aa, Artificial Sequence
  Synthetically generated peptide
  VARIANT (1)..(17): Xaa = Any Amino Acid
ACEWXCANPAXCTGXXC

SEQ ID NO: 14332 - protein, 15 aa, Artificial Sequence
  Synthetically generated peptide
  VARIANT (1)..(15): Xaa = Any Amino Acid
ACEWXCANPACXTGC

SEQ ID NO: 14333 - protein, 16 aa, Artificial Sequence
  Synthetically generated peptide
  VARIANT (1)..(16): Xaa = Any Amino Acid
ACEWXCANPACXXTGC

SEQ ID NO: 14334 - protein, 17 aa, Artificial Sequence
  Synthetically generated peptide
  VARIANT (1)..(17): Xaa = Any Amino Acid
ACEWXCANPACXXXTGC

SEQ ID NO: 14335 - protein, 17 aa, Artificial Sequence
  Synthetically generated peptide
  VARIANT (1)..(17): Xaa = Any Amino Acid
ACEWXCANPACXXTXGC

SEQ ID NO: 14336 - protein, 17 aa, Artificial Sequence
  Synthetically generated peptide
  VARIANT (1)..(17): Xaa = Any Amino Acid
ACEWXCANPACXXTGXC

SEQ ID NO: 14337 - protein, 16 aa, Artificial Sequence
  Synthetically generated peptide
  VARIANT (1)..(16): Xaa = Any Amino Acid
ACEWXCANPACXTXGC

SEQ ID NO: 14338 - protein, 17 aa, Artificial Sequence
  Synthetically generated peptide
  VARIANT (1)..(17): Xaa = Any Amino Acid
ACEWXCANPACXTXXGC

SEQ ID NO: 14339 - protein, 17 aa, Artificial Sequence
  Synthetically generated peptide
  VARIANT (1)..(17): Xaa = Any Amino Acid
ACEWXCANPACXTXGXC

SEQ ID NO: 14340 - protein, 16 aa, Artificial Sequence
  Synthetically generated peptide
  VARIANT (1)..(16): Xaa = Any Amino Acid
ACEWXCANPACXTGXC

SEQ ID NO: 14341 - protein, 17 aa, Artificial Sequence
  Synthetically generated peptide
  VARIANT (1)..(17): Xaa = Any Amino Acid
ACEWXCANPACXTGXXC

SEQ ID NO: 14342 - protein, 15 aa, Artificial Sequence
  Synthetically generated peptide
  VARIANT (1)..(15): Xaa = Any Amino Acid
ACEWXCANPACTXGC

SEQ ID NO: 14343 - protein, 16 aa, Artificial Sequence
  Synthetically generated peptide
  VARIANT (1)..(16): Xaa = Any Amino Acid
ACEWXCANPACTXXGC

SEQ ID NO: 14344 - protein, 17 aa, Artificial Sequence
  Synthetically generated peptide
  VARIANT (1)..(17): Xaa = Any Amino Acid
ACEWXCANPACTXXXGC

SEQ ID NO: 14345 - protein, 17 aa, Artificial Sequence
  Synthetically generated peptide
  VARIANT (1)..(17): Xaa = Any Amino Acid
ACEWXCANPACTXXGXC

SEQ ID NO: 14346 - protein, 16 aa, Artificial Sequence
  Synthetically generated peptide
  VARIANT (1)..(16): Xaa = Any Amino Acid
ACEWXCANPACTXGXC

SEQ ID NO: 14347 - protein, 17 aa, Artificial Sequence
  Synthetically generated peptide
  VARIANT (1)..(17): Xaa = Any Amino Acid
ACEWXCANPACTXGXXC

SEQ ID NO: 14348 - protein, 15 aa, Artificial Sequence
  Synthetically generated peptide
  VARIANT (1)..(15): Xaa = Any Amino Acid
ACEWXCANPACTGXC

SEQ ID NO: 14349 - protein, 16 aa, Artificial Sequence
  Synthetically generated peptide
  VARIANT (1)..(16): Xaa = Any Amino Acid
ACEWXCANPACTGXXC

SEQ ID NO: 14350 - protein, 17 aa, Artificial Sequence
  Synthetically generated peptide
  VARIANT (1)..(17): Xaa = Any Amino Acid
ACEWXCANPACTGXXXC

SEQ ID NO: 14351 - protein, 14 aa, Artificial Sequence
  Synthetically generated peptide
  VARIANT (1)..(14): Xaa = Any Amino Acid
ACEWCAXNPACTGC

SEQ ID NO: 14352 - protein, 15 aa, Artificial Sequence
  Synthetically generated peptide
  VARIANT (1)..(15): Xaa = Any Amino Acid
ACEWCAXXNPACTGC

SEQ ID NO: 14353 - protein, 16 aa, Artificial Sequence
  Synthetically generated peptide
  VARIANT (1)..(16): Xaa = Any Amino Acid
ACEWCAXXXNPACTGC

SEQ ID NO: 14354 - protein, 17 aa, Artificial Sequence
  Synthetically generated peptide
  VARIANT (1)..(17): Xaa = Any Amino Acid
ACEWCAXXXXNPACTGC

SEQ ID NO: 14355 - protein, 17 aa, Artificial Sequence
  Synthetically generated peptide
  VARIANT (1)..(17): Xaa = Any Amino Acid
ACEWCAXXXNXPACTGC

SEQ ID NO: 14356 - protein, 17 aa, Artificial Sequence
  Synthetically generated peptide
  VARIANT (1)..(17): Xaa = Any Amino Acid
ACEWCAXXXNPXACTGC

SEQ ID NO: 14357 - protein, 17 aa, Artificial Sequence
  Synthetically generated peptide
  VARIANT (1)..(17): Xaa = Any Amino Acid
ACEWCAXXXNPAXCTGC

SEQ ID NO: 14358 - protein, 17 aa, Artificial Sequence
  Synthetically generated peptide
  VARIANT (1)..(17): Xaa = Any Amino Acid
ACEWCAXXXNPACXTGC

SEQ ID NO: 14359 - protein, 17 aa, Artificial Sequence
  Synthetically generated peptide
  VARIANT (1)..(17): Xaa = Any Amino Acid
ACEWCAXXXNPACTXGC

SEQ ID NO: 14360 - protein, 17 aa, Artificial Sequence
  Synthetically generated peptide
  VARIANT (1)..(17): Xaa = Any Amino Acid
ACEWCAXXXNPACTGXC

SEQ ID NO: 14361 - protein, 16 aa, Artificial Sequence
  Synthetically generated peptide
  VARIANT (1)..(16): Xaa = Any Amino Acid
ACEWCAXXNXPACTGC

SEQ ID NO: 14362 - protein, 17 aa, Artificial Sequence
  Synthetically generated peptide
  VARIANT (1)..(17): Xaa = Any Amino Acid
ACEWCAXXNXXPACTGC

SEQ ID NO: 14363 - protein, 17 aa, Artificial Sequence
  Synthetically generated peptide
  VARIANT (1)..(17): Xaa = Any Amino Acid
ACEWCAXXNXPXACTGC

SEQ ID NO: 14364 - protein, 17 aa, Artificial Sequence
  Synthetically generated peptide
  VARIANT (1)..(17): Xaa = Any Amino Acid
ACEWCAXXNXPAXCTGC

SEQ ID NO: 14365 - protein, 17 aa, Artificial Sequence
  Synthetically generated peptide
  VARIANT (1)..(17): Xaa = Any Amino Acid
ACEWCAXXNXPACXTGC

SEQ ID NO: 14366 - protein, 17 aa, Artificial Sequence
  Synthetically generated peptide
  VARIANT (1)..(17): Xaa = Any Amino Acid
ACEWCAXXNXPACTXGC

SEQ ID NO: 14367 - protein, 17 aa, Artificial Sequence
  Synthetically generated peptide
  VARIANT (1)..(17): Xaa = Any Amino Acid
ACEWCAXXNXPACTGXC

SEQ ID NO: 14368 - protein, 16 aa, Artificial Sequence
  Synthetically generated peptide
  VARIANT (1)..(16): Xaa = Any Amino Acid
ACEWCAXXNPXACTGC

SEQ ID NO: 14369 - protein, 17 aa, Artificial Sequence
  Synthetically generated peptide
  VARIANT (1)..(17): Xaa = Any Amino Acid
ACEWCAXXNPXXACTGC

SEQ ID NO: 14370 - protein, 17 aa, Artificial Sequence
  Synthetically generated peptide
  VARIANT (1)..(17): Xaa = Any Amino Acid
ACEWCAXXNPXAXCTGC

SEQ ID NO: 14371 - protein, 17 aa, Artificial Sequence
  Synthetically generated peptide
  VARIANT (1)..(17): Xaa = Any Amino Acid
ACEWCAXXNPXACXTGC

SEQ ID NO: 14372 - protein, 17 aa, Artificial Sequence
  Synthetically generated peptide
  VARIANT (1)..(17): Xaa = Any Amino Acid
ACEWCAXXNPXACTXGC

SEQ ID NO: 14373 - protein, 17 aa, Artificial Sequence
  Synthetically generated peptide
  VARIANT (1)..(17): Xaa = Any Amino Acid
ACEWCAXXNPXACTGXC

SEQ ID NO: 14374 - protein, 16 aa, Artificial Sequence
  Synthetically generated peptide
  VARIANT (1)..(16): Xaa = Any Amino Acid
ACEWCAXXNPAXCTGC

SEQ ID NO: 14375 - protein, 17 aa, Artificial Sequence
  Synthetically generated peptide
  VARIANT (1)..(17): Xaa = Any Amino Acid
ACEWCAXXNPAXXCTGC

SEQ ID NO: 14376 - protein, 17 aa, Artificial Sequence
  Synthetically generated peptide
  VARIANT (1)..(17): Xaa = Any Amino Acid
ACEWCAXXNPAXCXTGC

SEQ ID NO: 14377 - protein, 17 aa, Artificial Sequence
  Synthetically generated peptide
  VARIANT (1)..(17): Xaa = Any Amino Acid
ACEWCAXXNPAXCTXGC

SEQ ID NO: 14378 - protein, 17 aa, Artificial Sequence
  Synthetically generated peptide
  VARIANT (1)..(17): Xaa = Any Amino Acid
ACEWCAXXNPAXCTGXC

SEQ ID NO: 14379 - protein, 16 aa, Artificial Sequence
  Synthetically generated peptide
  VARIANT (1)..(16): Xaa = Any Amino Acid
ACEWCAXXNPACXTGC

SEQ ID NO: 14380 - protein, 17 aa, Artificial Sequence
  Synthetically generated peptide
  VARIANT (1)..(17): Xaa = Any Amino Acid
ACEWCAXXNPACXXTGC

SEQ ID NO: 14381 - protein, 17 aa, Artificial Sequence
  Synthetically generated peptide
  VARIANT (1)..(17): Xaa = Any Amino Acid
ACEWCAXXNPACXTXGC

SEQ ID NO: 14382 - protein, 17 aa, Artificial Sequence
  Synthetically generated peptide
  VARIANT (1)..(17): Xaa = Any Amino Acid
ACEWCAXXNPACXTGXC

SEQ ID NO: 14383 - protein, 16 aa, Artificial Sequence
  Synthetically generated peptide
  VARIANT (1)..(16): Xaa = Any Amino Acid
ACEWCAXXNPACTXGC

SEQ ID NO: 14384 - protein, 17 aa, Artificial Sequence
  Synthetically generated peptide
  VARIANT (1)..(17): Xaa = Any Amino Acid
ACEWCAXXNPACTXXGC

SEQ ID NO: 14385 - protein, 17 aa, Artificial Sequence
  Synthetically generated peptide
  VARIANT (1)..(17): Xaa = Any Amino Acid
ACEWCAXXNPACTXGXC

SEQ ID NO: 14386 - protein, 16 aa, Artificial Sequence
  Synthetically generated peptide
  VARIANT (1)..(16): Xaa = Any Amino Acid
ACEWCAXXNPACTGXC

SEQ ID NO: 14387 - protein, 17 aa, Artificial Sequence
  Synthetically generated peptide
  VARIANT (1)..(17): Xaa = Any Amino Acid
ACEWCAXXNPACTGXXC

SEQ ID NO: 14388 - protein, 15 aa, Artificial Sequence
  Synthetically generated peptide
  VARIANT (1)..(15): Xaa = Any Amino Acid
ACEWCAXNXPACTGC

SEQ ID NO: 14389 - protein, 16 aa, Artificial Sequence
  Synthetically generated peptide
  VARIANT (1)..(16): Xaa = Any Amino Acid
ACEWCAXNXXPACTGC

SEQ ID NO: 14390 - protein, 17 aa, Artificial Sequence
  Synthetically generated peptide
  VARIANT (1)..(17): Xaa = Any Amino Acid
ACEWCAXNXXXPACTGC

SEQ ID NO: 14391 - protein, 17 aa, Artificial Sequence
  Synthetically generated peptide
  VARIANT (1)..(17): Xaa = Any Amino Acid
ACEWCAXNXXPXACTGC

SEQ ID NO: 14392 - protein, 17 aa, Artificial Sequence
  Synthetically generated peptide
  VARIANT (1)..(17): Xaa = Any Amino Acid
ACEWCAXNXXPAXCTGC

SEQ ID NO: 14393 - protein, 17 aa, Artificial Sequence
  Synthetically generated peptide
  VARIANT (1)..(17): Xaa = Any Amino Acid
ACEWCAXNXXPACXTGC

SEQ ID NO: 14394 - protein, 17 aa, Artificial Sequence
  Synthetically generated peptide
  VARIANT (1)..(17): Xaa = Any Amino Acid
ACEWCAXNXXPACTXGC

SEQ ID NO: 14395 - protein, 17 aa, Artificial Sequence
  Synthetically generated peptide
  VARIANT (1)..(17): Xaa = Any Amino Acid
ACEWCAXNXXPACTGXC

SEQ ID NO: 14396 - protein, 16 aa, Artificial Sequence
  Synthetically generated peptide
  VARIANT (1)..(16): Xaa = Any Amino Acid
ACEWCAXNXPXACTGC

SEQ ID NO: 14397 - protein, 17 aa, Artificial Sequence
  Synthetically generated peptide
  VARIANT (1)..(17): Xaa = Any Amino Acid
ACEWCAXNXPXXACTGC

SEQ ID NO: 14398 - protein, 17 aa, Artificial Sequence
  Synthetically generated peptide
  VARIANT (1)..(17): Xaa = Any Amino Acid
ACEWCAXNXPXAXCTGC

SEQ ID NO: 14399 - protein, 17 aa, Artificial Sequence
  Synthetically generated peptide
  VARIANT (1)..(17): Xaa = Any Amino Acid
ACEWCAXNXPXACXTGC

SEQ ID NO: 14400 - protein, 17 aa, Artificial Sequence
  Synthetically generated peptide
  VARIANT (1)..(17): Xaa = Any Amino Acid
ACEWCAXNXPXACTXGC

SEQ ID NO: 14401 - protein, 17 aa, Artificial Sequence
  Synthetically generated peptide
  VARIANT (1)..(17): Xaa = Any Amino Acid
ACEWCAXNXPXACTGXC

SEQ ID NO: 14402 - protein, 16 aa, Artificial Sequence
  Synthetically generated peptide
  VARIANT (1)..(16): Xaa = Any Amino Acid
ACEWCAXNXPAXCTGC

SEQ ID NO: 14403 - protein, 17 aa, Artificial Sequence
  Synthetically generated peptide
  VARIANT (1)..(17): Xaa = Any Amino Acid
ACEWCAXNXPAXXCTGC

SEQ ID NO: 14404 - protein, 17 aa, Artificial Sequence
  Synthetically generated peptide
  VARIANT (1)..(17): Xaa = Any Amino Acid
ACEWCAXNXPAXCXTGC

SEQ ID NO: 14405 - protein, 17 aa, Artificial Sequence
  Synthetically generated peptide
  VARIANT (1)..(17): Xaa = Any Amino Acid
ACEWCAXNXPAXCTXGC

SEQ ID NO: 14406 - protein, 17 aa, Artificial Sequence
  Synthetically generated peptide
  VARIANT (1)..(17): Xaa = Any Amino Acid
ACEWCAXNXPAXCTGXC

SEQ ID NO: 14407 - protein, 16 aa, Artificial Sequence
  Synthetically generated peptide
  VARIANT (1)..(16): Xaa = Any Amino Acid
ACEWCAXNXPACXTGC

SEQ ID NO: 14408 - protein, 17 aa, Artificial Sequence
  Synthetically generated peptide
  VARIANT (1)..(17): Xaa = Any Amino Acid
ACEWCAXNXPACXXTGC

SEQ ID NO: 14409 - protein, 17 aa, Artificial Sequence
  Synthetically generated peptide
  VARIANT (1)..(17): Xaa = Any Amino Acid
ACEWCAXNXPACXTXGC

SEQ ID NO: 14410 - protein, 17 aa, Artificial Sequence
  Synthetically generated peptide
  VARIANT (1)..(17): Xaa = Any Amino Acid
ACEWCAXNXPACXTGXC

SEQ ID NO: 14411 - protein, 16 aa, Artificial Sequence
  Synthetically generated peptide
  VARIANT (1)..(16): Xaa = Any Amino Acid
ACEWCAXNXPACTXGC

SEQ ID NO: 14412 - protein, 17 aa, Artificial Sequence
  Synthetically generated peptide
  VARIANT (1)..(17): Xaa = Any Amino Acid
ACEWCAXNXPACTXXGC

SEQ ID NO: 14413 - protein, 17 aa, Artificial Sequence
  Synthetically generated peptide
  VARIANT (1)..(17): Xaa = Any Amino Acid
ACEWCAXNXPACTXGXC

SEQ ID NO: 14414 - protein, 16 aa, Artificial Sequence
  Synthetically generated peptide
  VARIANT (1)..(16): Xaa = Any Amino Acid
ACEWCAXNXPACTGXC

SEQ ID NO: 14415 - protein, 17 aa, Artificial Sequence
  Synthetically generated peptide
  VARIANT (1)..(17): Xaa = Any Amino Acid
ACEWCAXNXPACTGXXC

SEQ ID NO: 14416 - protein, 15 aa, Artificial Sequence
  Synthetically generated peptide
  VARIANT (1)..(15): Xaa = Any Amino Acid
ACEWCAXNPXACTGC

SEQ ID NO: 14417 - protein, 16 aa, Artificial Sequence
  Synthetically generated peptide
  VARIANT (1)..(16): Xaa = Any Amino Acid
ACEWCAXNPXXACTGC

SEQ ID NO: 14418 - protein, 17 aa, Artificial Sequence
  Synthetically generated peptide
  VARIANT (1)..(17): Xaa = Any Amino Acid
ACEWCAXNPXXXACTGC

SEQ ID NO: 14419 - protein, 17 aa, Artificial Sequence
  Synthetically generated peptide
  VARIANT (1)..(17): Xaa = Any Amino Acid
ACEWCAXNPXXAXCTGC

SEQ ID NO: 14420 - protein, 17 aa, Artificial Sequence
  Synthetically generated peptide
  VARIANT (1)..(17): Xaa = Any Amino Acid
ACEWCAXNPXXACXTGC

SEQ ID NO: 14421 - protein, 17 aa, Artificial Sequence
  Synthetically generated peptide
  VARIANT (1)..(17): Xaa = Any Amino Acid
ACEWCAXNPXXACTXGC

SEQ ID NO: 14422 - protein, 17 aa, Artificial Sequence
  Synthetically generated peptide
  VARIANT (1)..(17): Xaa = Any Amino Acid
ACEWCAXNPXXACTGXC

SEQ ID NO: 14423 - protein, 16 aa, Artificial Sequence
  Synthetically generated peptide
  VARIANT (1)..(16): Xaa = Any Amino Acid
ACEWCAXNPXAXCTGC

SEQ ID NO: 14424 - protein, 17 aa, Artificial Sequence
  Synthetically generated peptide
  VARIANT (1)..(17): Xaa = Any Amino Acid
ACEWCAXNPXAXXCTGC

SEQ ID NO: 14425 - protein, 17 aa, Artificial Sequence
  Synthetically generated peptide
  VARIANT (1)..(17): Xaa = Any Amino Acid
ACEWCAXNPXAXCXTGC

SEQ ID NO: 14426 - protein, 17 aa, Artificial Sequence
  Synthetically generated peptide
  VARIANT (1)..(17): Xaa = Any Amino Acid
ACEWCAXNPXAXCTXGC

SEQ ID NO: 14427 - protein, 17 aa, Artificial Sequence
  Synthetically generated peptide
  VARIANT (1)..(17): Xaa = Any Amino Acid
ACEWCAXNPXAXCTGXC

SEQ ID NO: 14428 - protein, 16 aa, Artificial Sequence
  Synthetically generated peptide
  VARIANT (1)..(16): Xaa = Any Amino Acid
ACEWCAXNPXACXTGC

SEQ ID NO: 14429 - protein, 17 aa, Artificial Sequence
  Synthetically generated peptide
  VARIANT (1)..(17): Xaa = Any Amino Acid
ACEWCAXNPXACXXTGC

SEQ ID NO: 14430 - protein, 17 aa, Artificial Sequence
  Synthetically generated peptide
  VARIANT (1)..(17): Xaa = Any Amino Acid
ACEWCAXNPXACXTXGC

SEQ ID NO: 14431 - protein, 17 aa, Artificial Sequence
  Synthetically generated peptide
  VARIANT (1)..(17): Xaa = Any Amino Acid
ACEWCAXNPXACXTGXC

SEQ ID NO: 14432 - protein, 16 aa, Artificial Sequence
  Synthetically generated peptide
  VARIANT (1)..(16): Xaa = Any Amino Acid
ACEWCAXNPXACTXGC

SEQ ID NO: 14433 - protein, 17 aa, Artificial Sequence
  Synthetically generated peptide
  VARIANT (1)..(17): Xaa = Any Amino Acid
ACEWCAXNPXACTXXGC

SEQ ID NO: 14434 - protein, 17 aa, Artificial Sequence
  Synthetically generated peptide
  VARIANT (1)..(17): Xaa = Any Amino Acid
ACEWCAXNPXACTXGXC

SEQ ID NO: 14435 - protein, 16 aa, Artificial Sequence
  Synthetically generated peptide
  VARIANT (1)..(16): Xaa = Any Amino Acid
ACEWCAXNPXACTGXC

SEQ ID NO: 14436 - protein, 17 aa, Artificial Sequence
  Synthetically generated peptide
  VARIANT (1)..(17): Xaa = Any Amino Acid
ACEWCAXNPXACTGXXC

SEQ ID NO: 14437 - protein, 15 aa, Artificial Sequence
  Synthetically generated peptide
  VARIANT (1)..(15): Xaa = Any Amino Acid
ACEWCAXNPAXCTGC

SEQ ID NO: 14438 - protein, 16 aa, Artificial Sequence
  Synthetically generated peptide
  VARIANT (1)..(16): Xaa = Any Amino Acid
ACEWCAXNPAXXCTGC

SEQ ID NO: 14439 - protein, 17 aa, Artificial Sequence
  Synthetically generated peptide
  VARIANT (1)..(17): Xaa = Any Amino Acid
ACEWCAXNPAXXXCTGC

SEQ ID NO: 14440 - protein, 17 aa, Artificial Sequence
  Synthetically generated peptide
  VARIANT (1)..(17): Xaa = Any Amino Acid
ACEWCAXNPAXXCXTGC

SEQ ID NO: 14441 - protein, 17 aa, Artificial Sequence
  Synthetically generated peptide
  VARIANT (1)..(17): Xaa = Any Amino Acid
ACEWCAXNPAXXCTXGC

SEQ ID NO: 14442 - protein, 17 aa, Artificial Sequence
  Synthetically generated peptide
  VARIANT (1)..(17): Xaa = Any Amino Acid
ACEWCAXNPAXXCTGXC

SEQ ID NO: 14443 - protein, 16 aa, Artificial Sequence
  Synthetically generated peptide
  VARIANT (1)..(16): Xaa = Any Amino Acid
ACEWCAXNPAXCXTGC

SEQ ID NO: 14444 - protein, 17 aa, Artificial Sequence
  Synthetically generated peptide
  VARIANT (1)..(17): Xaa = Any Amino Acid
ACEWCAXNPAXCXXTGC

SEQ ID NO: 14445 - protein, 17 aa, Artificial Sequence
  Synthetically generated peptide
  VARIANT (1)..(17): Xaa = Any Amino Acid
ACEWCAXNPAXCXTXGC

SEQ ID NO: 14446 - protein, 17 aa, Artificial Sequence
  Synthetically generated peptide
  VARIANT (1)..(17): Xaa = Any Amino Acid
ACEWCAXNPAXCXTGXC

SEQ ID NO: 14447 - protein, 16 aa, Artificial Sequence
  Synthetically generated peptide
  VARIANT (1)..(16): Xaa = Any Amino Acid
ACEWCAXNPAXCTXGC

SEQ ID NO: 14448 - protein, 17 aa, Artificial Sequence
  Synthetically generated peptide
  VARIANT (1)..(17): Xaa = Any Amino Acid
ACEWCAXNPAXCTXXGC

SEQ ID NO: 14449 - protein, 17 aa, Artificial Sequence
  Synthetically generated peptide
  VARIANT (1)..(17): Xaa = Any Amino Acid
ACEWCAXNPAXCTXGXC

SEQ ID NO: 14450 - protein, 16 aa, Artificial Sequence
  Synthetically generated peptide
  VARIANT (1)..(16): Xaa = Any Amino Acid
ACEWCAXNPAXCTGXC

SEQ ID NO: 14451 - protein, 17 aa, Artificial Sequence
  Synthetically generated peptide
  VARIANT (1)..(17): Xaa = Any Amino Acid
ACEWCAXNPAXCTGXXC

SEQ ID NO: 14452 - protein, 15 aa, Artificial Sequence
  Synthetically generated peptide
  VARIANT (1)..(15): Xaa = Any Amino Acid
ACEWCAXNPACXTGC

SEQ ID NO: 14453 - protein, 16 aa, Artificial Sequence
  Synthetically generated peptide
  VARIANT (1)..(16): Xaa = Any Amino Acid
ACEWCAXNPACXXTGC

SEQ ID NO: 14454 - protein, 17 aa, Artificial Sequence
  Synthetically generated peptide
  VARIANT (1)..(17): Xaa = Any Amino Acid
ACEWCAXNPACXXXTGC

SEQ ID NO: 14455 - protein, 17 aa, Artificial Sequence
  Synthetically generated peptide
  VARIANT (1)..(17): Xaa = Any Amino Acid
ACEWCAXNPACXXTXGC

SEQ ID NO: 14456 - protein, 17 aa, Artificial Sequence
  Synthetically generated peptide
  VARIANT (1)..(17): Xaa = Any Amino Acid
ACEWCAXNPACXXTGXC

SEQ ID NO: 14457 - protein, 16 aa, Artificial Sequence
  Synthetically generated peptide
  VARIANT (1)..(16): Xaa = Any Amino Acid
ACEWCAXNPACXTXGC

SEQ ID NO: 14458 - protein, 17 aa, Artificial Sequence
  Synthetically generated peptide
  VARIANT (1)..(17): Xaa = Any Amino Acid
ACEWCAXNPACXTXXGC

SEQ ID NO: 14459 - protein, 17 aa, Artificial Sequence
  Synthetically generated peptide
  VARIANT (1)..(17): Xaa = Any Amino Acid
ACEWCAXNPACXTXGXC

SEQ ID NO: 14460 - protein, 16 aa, Artificial Sequence
  Synthetically generated peptide
  VARIANT (1)..(16): Xaa = Any Amino Acid
ACEWCAXNPACXTGXC

SEQ ID NO: 14461 - protein, 17 aa, Artificial Sequence
  Synthetically generated peptide
  VARIANT (1)..(17): Xaa = Any Amino Acid
ACEWCAXNPACXTGXXC

SEQ ID NO: 14462 - protein, 15 aa, Artificial Sequence
  Synthetically generated peptide
  VARIANT (1)..(15): Xaa = Any Amino Acid
ACEWCAXNPACTXGC

SEQ ID NO: 14463 - protein, 16 aa, Artificial Sequence
  Synthetically generated peptide
  VARIANT (1)..(16): Xaa = Any Amino Acid
ACEWCAXNPACTXXGC

SEQ ID NO: 14464 - protein, 17 aa, Artificial Sequence
  Synthetically generated peptide
  VARIANT (1)..(17): Xaa = Any Amino Acid
ACEWCAXNPACTXXXGC

SEQ ID NO: 14465 - protein, 17 aa, Artificial Sequence
  Synthetically generated peptide
  VARIANT (1)..(17): Xaa = Any Amino Acid
ACEWCAXNPACTXXGXC

SEQ ID NO: 14466 - protein, 16 aa, Artificial Sequence
  Synthetically generated peptide
  VARIANT (1)..(16): Xaa = Any Amino Acid
ACEWCAXNPACTXGXC

SEQ ID NO: 14467 - protein, 17 aa, Artificial Sequence
  Synthetically generated peptide
  VARIANT (1)..(17): Xaa = Any Amino Acid
ACEWCAXNPACTXGXXC

SEQ ID NO: 14468 - protein, 15 aa, Artificial Sequence
  Synthetically generated peptide
  VARIANT (1)..(15): Xaa = Any Amino Acid
ACEWCAXNPACTGXC

SEQ ID NO: 14469 - protein, 16 aa, Artificial Sequence
  Synthetically generated peptide
  VARIANT (1)..(16): Xaa = Any Amino Acid
ACEWCAXNPACTGXXC

SEQ ID NO: 14470 - protein, 17 aa, Artificial Sequence
  Synthetically generated peptide
  VARIANT (1)..(17): Xaa = Any Amino Acid
ACEWCAXNPACTGXXXC

SEQ ID NO: 14471 - protein, 14 aa, Artificial Sequence
  Synthetically generated peptide
  VARIANT (1)..(14): Xaa = Any Amino Acid
ACEWCANXPACTGC

SEQ ID NO: 14472 - protein, 15 aa, Artificial Sequence
  Synthetically generated peptide
  VARIANT (1)..(15): Xaa = Any Amino Acid
ACEWCANXXPACTGC

SEQ ID NO: 14473 - protein, 16 aa, Artificial Sequence
  Synthetically generated peptide
  VARIANT (1)..(16): Xaa = Any Amino Acid
ACEWCANXXXPACTGC

SEQ ID NO: 14474 - protein, 17 aa, Artificial Sequence
  Synthetically generated peptide
  VARIANT (1)..(17): Xaa = Any Amino Acid
ACEWCANXXXXPACTGC

SEQ ID NO: 14475 - protein, 17 aa, Artificial Sequence
  Synthetically generated peptide
  VARIANT (1)..(17): Xaa = Any Amino Acid
ACEWCANXXXPXACTGC

SEQ ID NO: 14476 - protein, 17 aa, Artificial Sequence
  Synthetically generated peptide
  VARIANT (1)..(17): Xaa = Any Amino Acid
ACEWCANXXXPAXCTGC

SEQ ID NO: 14477 - protein, 17 aa, Artificial Sequence
  Synthetically generated peptide
  VARIANT (1)..(17): Xaa = Any Amino Acid
ACEWCANXXXPACXTGC

SEQ ID NO: 14478 - protein, 17 aa, Artificial Sequence
  Synthetically generated peptide
  VARIANT (1)..(17): Xaa = Any Amino Acid
ACEWCANXXXPACTXGC

SEQ ID NO: 14479 - protein, 17 aa, Artificial Sequence
  Synthetically generated peptide
  VARIANT (1)..(17): Xaa = Any Amino Acid
ACEWCANXXXPACTGXC

SEQ ID NO: 14480 - protein, 16 aa, Artificial Sequence
  Synthetically generated peptide
  VARIANT (1)..(16): Xaa = Any Amino Acid
ACEWCANXXPXACTGC

SEQ ID NO: 14481 - protein, 17 aa, Artificial Sequence
  Synthetically generated peptide
  VARIANT (1)..(17): Xaa = Any Amino Acid
ACEWCANXXPXXACTGC

SEQ ID NO: 14482 - protein, 17 aa, Artificial Sequence
  Synthetically generated peptide
  VARIANT (1)..(17): Xaa = Any Amino Acid
ACEWCANXXPXAXCTGC

SEQ ID NO: 14483 - protein, 17 aa, Artificial Sequence
  Synthetically generated peptide
  VARIANT (1)..(17): Xaa = Any Amino Acid
ACEWCANXXPXACXTGC

SEQ ID NO: 14484 - protein, 17 aa, Artificial Sequence
  Synthetically generated peptide
  VARIANT (1)..(17): Xaa = Any Amino Acid
ACEWCANXXPXACTXGC

SEQ ID NO: 14485 - protein, 17 aa, Artificial Sequence
  Synthetically generated peptide
  VARIANT (1)..(17): Xaa = Any Amino Acid
ACEWCANXXPXACTGXC

SEQ ID NO: 14486 - protein, 16 aa, Artificial Sequence
  Synthetically generated peptide
  VARIANT (1)..(16): Xaa = Any Amino Acid
ACEWCANXXPAXCTGC

SEQ ID NO: 14487 - protein, 17 aa, Artificial Sequence
  Synthetically generated peptide
  VARIANT (1)..(17): Xaa = Any Amino Acid
ACEWCANXXPAXXCTGC

SEQ ID NO: 14488 - protein, 17 aa, Artificial Sequence
  Synthetically generated peptide
  VARIANT (1)..(17): Xaa = Any Amino Acid
ACEWCANXXPAXCXTGC

SEQ ID NO: 14489 - protein, 17 aa, Artificial Sequence
  Synthetically generated peptide
  VARIANT (1)..(17): Xaa = Any Amino Acid
ACEWCANXXPAXCTXGC

SEQ ID NO: 14490 - protein, 17 aa, Artificial Sequence
  Synthetically generated peptide
  VARIANT (1)..(17): Xaa = Any Amino Acid
ACEWCANXXPAXCTGXC

SEQ ID NO: 14491 - protein, 16 aa, Artificial Sequence
  Synthetically generated peptide
  VARIANT (1)..(16): Xaa = Any Amino Acid
ACEWCANXXPACXTGC

SEQ ID NO: 14492 - protein, 17 aa, Artificial Sequence
  Synthetically generated peptide
  VARIANT (1)..(17): Xaa = Any Amino Acid
ACEWCANXXPACXXTGC

SEQ ID NO: 14493 - protein, 17 aa, Artificial Sequence
  Synthetically generated peptide
  VARIANT (1)..(17): Xaa = Any Amino Acid
ACEWCANXXPACXTXGC

SEQ ID NO: 14494 - protein, 17 aa, Artificial Sequence
  Synthetically generated peptide
  VARIANT (1)..(17): Xaa = Any Amino Acid
ACEWCANXXPACXTGXC

SEQ ID NO: 14495 - protein, 16 aa, Artificial Sequence
  Synthetically generated peptide
  VARIANT (1)..(16): Xaa = Any Amino Acid
ACEWCANXXPACTXGC

SEQ ID NO: 14496 - protein, 17 aa, Artificial Sequence
  Synthetically generated peptide
  VARIANT (1)..(17): Xaa = Any Amino Acid
ACEWCANXXPACTXXGC

SEQ ID NO: 14497 - protein, 17 aa, Artificial Sequence
  Synthetically generated peptide
  VARIANT (1)..(17): Xaa = Any Amino Acid
ACEWCANXXPACTXGXC

SEQ ID NO: 14498 - protein, 16 aa, Artificial Sequence
  Synthetically generated peptide
  VARIANT (1)..(16): Xaa = Any Amino Acid
ACEWCANXXPACTGXC

SEQ ID NO: 14499 - protein, 17 aa, Artificial Sequence
  Synthetically generated peptide
  VARIANT (1)..(17): Xaa = Any Amino Acid
ACEWCANXXPACTGXXC

SEQ ID NO: 14500 - protein, 15 aa, Artificial Sequence
  Synthetically generated peptide
  VARIANT (1)..(15): Xaa = Any Amino Acid
ACEWCANXPXACTGC

SEQ ID NO: 14501 - protein, 16 aa, Artificial Sequence
  Synthetically generated peptide
  VARIANT (1)..(16): Xaa = Any Amino Acid
ACEWCANXPXXACTGC

SEQ ID NO: 14502 - protein, 17 aa, Artificial Sequence
  Synthetically generated peptide
  VARIANT (1)..(17): Xaa = Any Amino Acid
ACEWCANXPXXXACTGC

SEQ ID NO: 14503 - protein, 17 aa, Artificial Sequence
  Synthetically generated peptide
  VARIANT (1)..(17): Xaa = Any Amino Acid
ACEWCANXPXXAXCTGC

SEQ ID NO: 14504 - protein, 17 aa, Artificial Sequence
  Synthetically generated peptide
  VARIANT (1)..(17): Xaa = Any Amino Acid
ACEWCANXPXXACXTGC

SEQ ID NO: 14505 - protein, 17 aa, Artificial Sequence
  Synthetically generated peptide
  VARIANT (1)..(17): Xaa = Any Amino Acid
ACEWCANXPXXACTXGC

SEQ ID NO: 14506 - protein, 17 aa, Artificial Sequence
  Synthetically generated peptide
  VARIANT (1)..(17): Xaa = Any Amino Acid
ACEWCANXPXXACTGXC

SEQ ID NO: 14507 - protein, 16 aa, Artificial Sequence
  Synthetically generated peptide
  VARIANT (1)..(16): Xaa = Any Amino Acid
ACEWCANXPXAXCTGC

SEQ ID NO: 14508 - protein, 17 aa, Artificial Sequence
  Synthetically generated peptide
  VARIANT (1)..(17): Xaa = Any Amino Acid
ACEWCANXPXAXXCTGC

SEQ ID NO: 14509 - protein, 17 aa, Artificial Sequence
  Synthetically generated peptide
  VARIANT (1)..(17): Xaa = Any Amino Acid
ACEWCANXPXAXCXTGC

SEQ ID NO: 14510 - protein, 17 aa, Artificial Sequence
  Synthetically generated peptide
  VARIANT (1)..(17): Xaa = Any Amino Acid
ACEWCANXPXAXCTXGC

SEQ ID NO: 14511 - protein, 17 aa, Artificial Sequence
  Synthetically generated peptide
  VARIANT (1)..(17): Xaa = Any Amino Acid
ACEWCANXPXAXCTGXC

SEQ ID NO: 14512 - protein, 16 aa, Artificial Sequence
  Synthetically generated peptide
  VARIANT (1)..(16): Xaa = Any Amino Acid
ACEWCANXPXACXTGC

SEQ ID NO: 14513 - protein, 17 aa, Artificial Sequence
  Synthetically generated peptide
  VARIANT (1)..(17): Xaa = Any Amino Acid
ACEWCANXPXACXXTGC

SEQ ID NO: 14514 - protein, 17 aa, Artificial Sequence
  Synthetically generated peptide
  VARIANT (1)..(17): Xaa = Any Amino Acid
ACEWCANXPXACXTXGC

SEQ ID NO: 14515 - protein, 17 aa, Artificial Sequence
  Synthetically generated peptide
  VARIANT (1)..(17): Xaa = Any Amino Acid
ACEWCANXPXACXTGXC

SEQ ID NO: 14516 - protein, 16 aa, Artificial Sequence
  Synthetically generated peptide
  VARIANT (1)..(16): Xaa = Any Amino Acid
ACEWCANXPXACTXGC

SEQ ID NO: 14517 - protein, 17 aa, Artificial Sequence
  Synthetically generated peptide
  VARIANT (1)..(17): Xaa = Any Amino Acid
ACEWCANXPXACTXXGC

SEQ ID NO: 14518 - protein, 17 aa, Artificial Sequence
  Synthetically generated peptide
  VARIANT (1)..(17): Xaa = Any Amino Acid
ACEWCANXPXACTXGXC

SEQ ID NO: 14519 - protein, 16 aa, Artificial Sequence
  Synthetically generated peptide
  VARIANT (1)..(16): Xaa = Any Amino Acid
ACEWCANXPXACTGXC

SEQ ID NO: 14520 - protein, 17 aa, Artificial Sequence
  Synthetically generated peptide
  VARIANT (1)..(17): Xaa = Any Amino Acid
ACEWCANXPXACTGXXC

SEQ ID NO: 14521 - protein, 15 aa, Artificial Sequence
  Synthetically generated peptide
  VARIANT (1)..(15): Xaa = Any Amino Acid
ACEWCANXPAXCTGC

SEQ ID NO: 14522 - protein, 16 aa, Artificial Sequence
  Synthetically generated peptide
  VARIANT (1)..(16): Xaa = Any Amino Acid
ACEWCANXPAXXCTGC

SEQ ID NO: 14523 - protein, 17 aa, Artificial Sequence
  Synthetically generated peptide
  VARIANT (1)..(17): Xaa = Any Amino Acid
ACEWCANXPAXXXCTGC

SEQ ID NO: 14524 - protein, 17 aa, Artificial Sequence
  Synthetically generated peptide
  VARIANT (1)..(17): Xaa = Any Amino Acid
ACEWCANXPAXXCXTGC

SEQ ID NO: 14525 - protein, 17 aa, Artificial Sequence
  Synthetically generated peptide
  VARIANT (1)..(17): Xaa = Any Amino Acid
ACEWCANXPAXXCTXGC

SEQ ID NO: 14526 - protein, 17 aa, Artificial Sequence
  Synthetically generated peptide
  VARIANT (1)..(17): Xaa = Any Amino Acid
ACEWCANXPAXXCTGXC

SEQ ID NO: 14527 - protein, 16 aa, Artificial Sequence
  Synthetically generated peptide
  VARIANT (1)..(16): Xaa = Any Amino Acid
ACEWCANXPAXCXTGC

SEQ ID NO: 14528 - protein, 17 aa, Artificial Sequence
  Synthetically generated peptide
  VARIANT (1)..(17): Xaa = Any Amino Acid
ACEWCANXPAXCXXTGC

SEQ ID NO: 14529 - protein, 17 aa, Artificial Sequence
  Synthetically generated peptide
  VARIANT (1)..(17): Xaa = Any Amino Acid
ACEWCANXPAXCXTXGC

SEQ ID NO: 14530 - protein, 17 aa, Artificial Sequence
  Synthetically generated peptide
  VARIANT (1)..(17): Xaa = Any Amino Acid
ACEWCANXPAXCXTGXC

SEQ ID NO: 14531 - protein, 16 aa, Artificial Sequence
  Synthetically generated peptide
  VARIANT (1)..(16): Xaa = Any Amino Acid
ACEWCANXPAXCTXGC

SEQ ID NO: 14532 - protein, 17 aa, Artificial Sequence
  Synthetically generated peptide
  VARIANT (1)..(17): Xaa = Any Amino Acid
ACEWCANXPAXCTXXGC

SEQ ID NO: 14533 - protein, 17 aa, Artificial Sequence
  Synthetically generated peptide
  VARIANT (1)..(17): Xaa = Any Amino Acid
ACEWCANXPAXCTXGXC

SEQ ID NO: 14534 - protein, 16 aa, Artificial Sequence
  Synthetically generated peptide
  VARIANT (1)..(16): Xaa = Any Amino Acid
ACEWCANXPAXCTGXC

SEQ ID NO: 14535 - protein, 17 aa, Artificial Sequence
  Synthetically generated peptide
  VARIANT (1)..(17): Xaa = Any Amino Acid
ACEWCANXPAXCTGXXC

SEQ ID NO: 14536 - protein, 15 aa, Artificial Sequence
  Synthetically generated peptide
  VARIANT (1)..(15): Xaa = Any Amino Acid
ACEWCANXPACXTGC

SEQ ID NO: 14537 - protein, 16 aa, Artificial Sequence
  Synthetically generated peptide
  VARIANT (1)..(16): Xaa = Any Amino Acid
ACEWCANXPACXXTGC

SEQ ID NO: 14538 - protein, 17 aa, Artificial Sequence
  Synthetically generated peptide
  VARIANT (1)..(17): Xaa = Any Amino Acid
ACEWCANXPACXXXTGC

SEQ ID NO: 14539 - protein, 17 aa, Artificial Sequence
  Synthetically generated peptide
  VARIANT (1)..(17): Xaa = Any Amino Acid
ACEWCANXPACXXTXGC

SEQ ID NO: 14540 - protein, 17 aa, Artificial Sequence
  Synthetically generated peptide
  VARIANT (1)..(17): Xaa = Any Amino Acid
ACEWCANXPACXXTGXC

SEQ ID NO: 14541 - protein, 16 aa, Artificial Sequence
  Synthetically generated peptide
  VARIANT (1)..(16): Xaa = Any Amino Acid
ACEWCANXPACXTXGC

SEQ ID NO: 14542 - protein, 17 aa, Artificial Sequence
  Synthetically generated peptide
  VARIANT (1)..(17): Xaa = Any Amino Acid
ACEWCANXPACXTXXGC

SEQ ID NO: 14543 - protein, 17 aa, Artificial Sequence
  Synthetically generated peptide
  VARIANT (1)..(17): Xaa = Any Amino Acid
ACEWCANXPACXTXGXC

SEQ ID NO: 14544 - protein, 16 aa, Artificial Sequence
  Synthetically generated peptide
  VARIANT (1)..(16): Xaa = Any Amino Acid
ACEWCANXPACXTGXC

SEQ ID NO: 14545 - protein, 17 aa, Artificial Sequence
  Synthetically generated peptide
  VARIANT (1)..(17): Xaa = Any Amino Acid
ACEWCANXPACXTGXXC

SEQ ID NO: 14546 - protein, 15 aa, Artificial Sequence
  Synthetically generated peptide
  VARIANT (1)..(15): Xaa = Any Amino Acid
ACEWCANXPACTXGC

SEQ ID NO: 14547 - protein, 16 aa, Artificial Sequence
  Synthetically generated peptide
  VARIANT (1)..(16): Xaa = Any Amino Acid
ACEWCANXPACTXXGC

SEQ ID NO: 14548 - protein, 17 aa, Artificial Sequence
  Synthetically generated peptide
  VARIANT (1)..(17): Xaa = Any Amino Acid
ACEWCANXPACTXXXGC

SEQ ID NO: 14549 - protein, 17 aa, Artificial Sequence
  Synthetically generated peptide
  VARIANT (1)..(17): Xaa = Any Amino Acid
ACEWCANXPACTXXGXC

SEQ ID NO: 14550 - protein, 16 aa, Artificial Sequence
  Synthetically generated peptide
  VARIANT (1)..(16): Xaa = Any Amino Acid
ACEWCANXPACTXGXC

SEQ ID NO: 14551 - protein, 17 aa, Artificial Sequence
  Synthetically generated peptide
  VARIANT (1)..(17): Xaa = Any Amino Acid
ACEWCANXPACTXGXXC

SEQ ID NO: 14552 - protein, 15 aa, Artificial Sequence
  Synthetically generated peptide
  VARIANT (1)..(15): Xaa = Any Amino Acid
ACEWCANXPACTGXC

SEQ ID NO: 14553 - protein, 16 aa, Artificial Sequence
  Synthetically generated peptide
  VARIANT (1)..(16): Xaa = Any Amino Acid
ACEWCANXPACTGXXC

SEQ ID NO: 14554 - protein, 17 aa, Artificial Sequence
  Synthetically generated peptide
  VARIANT (1)..(17): Xaa = Any Amino Acid
ACEWCANXPACTGXXXC

SEQ ID NO: 14555 - protein, 14 aa, Artificial Sequence
  Synthetically generated peptide
  VARIANT (1)..(14): Xaa = Any Amino Acid
ACEWCANPXACTGC

SEQ ID NO: 14556 - protein, 15 aa, Artificial Sequence
  Synthetically generated peptide
  VARIANT (1)..(15): Xaa = Any Amino Acid
ACEWCANPXXACTGC

SEQ ID NO: 14557 - protein, 16 aa, Artificial Sequence
  Synthetically generated peptide
  VARIANT (1)..(16): Xaa = Any Amino Acid
ACEWCANPXXXACTGC

SEQ ID NO: 14558 - protein, 17 aa, Artificial Sequence
  Synthetically generated peptide
  VARIANT (1)..(17): Xaa = Any Amino Acid
ACEWCANPXXXXACTGC

SEQ ID NO: 14559 - protein, 17 aa, Artificial Sequence
  Synthetically generated peptide
  VARIANT (1)..(17): Xaa = Any Amino Acid
ACEWCANPXXXAXCTGC

SEQ ID NO: 14560 - protein, 17 aa, Artificial Sequence
  Synthetically generated peptide
  VARIANT (1)..(17): Xaa = Any Amino Acid
ACEWCANPXXXACXTGC

SEQ ID NO: 14561 - protein, 17 aa, Artificial Sequence
  Synthetically generated peptide
  VARIANT (1)..(17): Xaa = Any Amino Acid
ACEWCANPXXXACTXGC

SEQ ID NO: 14562 - protein, 17 aa, Artificial Sequence
  Synthetically generated peptide
  VARIANT (1)..(17): Xaa = Any Amino Acid
ACEWCANPXXXACTGXC

SEQ ID NO: 14563 - protein, 16 aa, Artificial Sequence
  Synthetically generated peptide
  VARIANT (1)..(16): Xaa = Any Amino Acid
ACEWCANPXXAXCTGC

SEQ ID NO: 14564 - protein, 17 aa, Artificial Sequence
  Synthetically generated peptide
  VARIANT (1)..(17): Xaa = Any Amino Acid
ACEWCANPXXAXXCTGC

SEQ ID NO: 14565 - protein, 17 aa, Artificial Sequence
  Synthetically generated peptide
  VARIANT (1)..(17): Xaa = Any Amino Acid
ACEWCANPXXAXCXTGC

SEQ ID NO: 14566 - protein, 17 aa, Artificial Sequence
  Synthetically generated peptide
  VARIANT (1)..(17): Xaa = Any Amino Acid
ACEWCANPXXAXCTXGC

SEQ ID NO: 14567 - protein, 17 aa, Artificial Sequence
  Synthetically generated peptide
  VARIANT (1)..(17): Xaa = Any Amino Acid
ACEWCANPXXAXCTGXC

SEQ ID NO: 14568 - protein, 16 aa, Artificial Sequence
  Synthetically generated peptide
  VARIANT (1)..(16): Xaa = Any Amino Acid
ACEWCANPXXACXTGC

SEQ ID NO: 14569 - protein, 17 aa, Artificial Sequence
  Synthetically generated peptide
  VARIANT (1)..(17): Xaa = Any Amino Acid
ACEWCANPXXACXXTGC

SEQ ID NO: 14570 - protein, 17 aa, Artificial Sequence
  Synthetically generated peptide
  VARIANT (1)..(17): Xaa = Any Amino Acid
ACEWCANPXXACXTXGC

SEQ ID NO: 14571 - protein, 17 aa, Artificial Sequence
  Synthetically generated peptide
  VARIANT (1)..(17): Xaa = Any Amino Acid
ACEWCANPXXACXTGXC

SEQ ID NO: 14572 - protein, 16 aa, Artificial Sequence
  Synthetically generated peptide
  VARIANT (1)..(16): Xaa = Any Amino Acid
ACEWCANPXXACTXGC

SEQ ID NO: 14573 - protein, 17 aa, Artificial Sequence
  Synthetically generated peptide
  VARIANT (1)..(17): Xaa = Any Amino Acid
ACEWCANPXXACTXXGC

SEQ ID NO: 14574 - protein, 17 aa, Artificial Sequence
  Synthetically generated peptide
  VARIANT (1)..(17): Xaa = Any Amino Acid
ACEWCANPXXACTXGXC

SEQ ID NO: 14575 - protein, 16 aa, Artificial Sequence
  Synthetically generated peptide
  VARIANT (1)..(16): Xaa = Any Amino Acid
ACEWCANPXXACTGXC

SEQ ID NO: 14576 - protein, 17 aa, Artificial Sequence
  Synthetically generated peptide
  VARIANT (1)..(17): Xaa = Any Amino Acid
ACEWCANPXXACTGXXC

SEQ ID NO: 14577 - protein, 15 aa, Artificial Sequence
  Synthetically generated peptide
  VARIANT (1)..(15): Xaa = Any Amino Acid
ACEWCANPXAXCTGC

SEQ ID NO: 14578 - protein, 16 aa, Artificial Sequence
  Synthetically generated peptide
  VARIANT (1)..(16): Xaa = Any Amino Acid
ACEWCANPXAXXCTGC

SEQ ID NO: 14579 - protein, 17 aa, Artificial Sequence
  Synthetically generated peptide
  VARIANT (1)..(17): Xaa = Any Amino Acid
ACEWCANPXAXXXCTGC

SEQ ID NO: 14580 - protein, 17 aa, Artificial Sequence
  Synthetically generated peptide
  VARIANT (1)..(17): Xaa = Any Amino Acid
ACEWCANPXAXXCXTGC

SEQ ID NO: 14581 - protein, 17 aa, Artificial Sequence
  Synthetically generated peptide
  VARIANT (1)..(17): Xaa = Any Amino Acid
ACEWCANPXAXXCTXGC

SEQ ID NO: 14582 - protein, 17 aa, Artificial Sequence
  Synthetically generated peptide
  VARIANT (1)..(17): Xaa = Any Amino Acid
ACEWCANPXAXXCTGXC

SEQ ID NO: 14583 - protein, 16 aa, Artificial Sequence
  Synthetically generated peptide
  VARIANT (1)..(16): Xaa = Any Amino Acid
ACEWCANPXAXCXTGC

SEQ ID NO: 14584 - protein, 17 aa, Artificial Sequence
  Synthetically generated peptide
  VARIANT (1)..(17): Xaa = Any Amino Acid
ACEWCANPXAXCXXTGC

SEQ ID NO: 14585 - protein, 17 aa, Artificial Sequence
  Synthetically generated peptide
  VARIANT (1)..(17): Xaa = Any Amino Acid
ACEWCANPXAXCXTXGC

SEQ ID NO: 14586 - protein, 17 aa, Artificial Sequence
  Synthetically generated peptide
  VARIANT (1)..(17): Xaa = Any Amino Acid
ACEWCANPXAXCXTGXC

SEQ ID NO: 14587 - protein, 16 aa, Artificial Sequence
  Synthetically generated peptide
  VARIANT (1)..(16): Xaa = Any Amino Acid
ACEWCANPXAXCTXGC

SEQ ID NO: 14588 - protein, 17 aa, Artificial Sequence
  Synthetically generated peptide
  VARIANT (1)..(17): Xaa = Any Amino Acid
ACEWCANPXAXCTXXGC

SEQ ID NO: 14589 - protein, 17 aa, Artificial Sequence
  Synthetically generated peptide
  VARIANT (1)..(17): Xaa = Any Amino Acid
ACEWCANPXAXCTXGXC

SEQ ID NO: 14590 - protein, 16 aa, Artificial Sequence
  Synthetically generated peptide
  VARIANT (1)..(16): Xaa = Any Amino Acid
ACEWCANPXAXCTGXC

SEQ ID NO: 14591 - protein, 17 aa, Artificial Sequence
  Synthetically generated peptide
  VARIANT (1)..(17): Xaa = Any Amino Acid
ACEWCANPXAXCTGXXC

SEQ ID NO: 14592 - protein, 15 aa, Artificial Sequence
  Synthetically generated peptide
  VARIANT (1)..(15): Xaa = Any Amino Acid
ACEWCANPXACXTGC

SEQ ID NO: 14593 - protein, 16 aa, Artificial Sequence
  Synthetically generated peptide
  VARIANT (1)..(16): Xaa = Any Amino Acid
ACEWCANPXACXXTGC

SEQ ID NO: 14594 - protein, 17 aa, Artificial Sequence
  Synthetically generated peptide
  VARIANT (1)..(17): Xaa = Any Amino Acid
ACEWCANPXACXXXTGC

SEQ ID NO: 14595 - protein, 17 aa, Artificial Sequence
  Synthetically generated peptide
  VARIANT (1)..(17): Xaa = Any Amino Acid
ACEWCANPXACXXTXGC

SEQ ID NO: 14596 - protein, 17 aa, Artificial Sequence
  Synthetically generated peptide
  VARIANT (1)..(17): Xaa = Any Amino Acid
ACEWCANPXACXXTGXC

SEQ ID NO: 14597 - protein, 16 aa, Artificial Sequence
  Synthetically generated peptide
  VARIANT (1)..(16): Xaa = Any Amino Acid
ACEWCANPXACXTXGC

SEQ ID NO: 14598 - protein, 17 aa, Artificial Sequence
  Synthetically generated peptide
  VARIANT (1)..(17): Xaa = Any Amino Acid
ACEWCANPXACXTXXGC

SEQ ID NO: 14599 - protein, 17 aa, Artificial Sequence
  Synthetically generated peptide
  VARIANT (1)..(17): Xaa = Any Amino Acid
ACEWCANPXACXTXGXC

SEQ ID NO: 14600 - protein, 16 aa, Artificial Sequence
  Synthetically generated peptide
  VARIANT (1)..(16): Xaa = Any Amino Acid
ACEWCANPXACXTGXC

SEQ ID NO: 14601 - protein, 17 aa, Artificial Sequence
  Synthetically generated peptide
  VARIANT (1)..(17): Xaa = Any Amino Acid
ACEWCANPXACXTGXXC

SEQ ID NO: 14602 - protein, 15 aa, Artificial Sequence
  Synthetically generated peptide
  VARIANT (1)..(15): Xaa = Any Amino Acid
ACEWCANPXACTXGC

SEQ ID NO: 14603 - protein, 16 aa, Artificial Sequence
  Synthetically generated peptide
  VARIANT (1)..(16): Xaa = Any Amino Acid
ACEWCANPXACTXXGC

SEQ ID NO: 14604 - protein, 17 aa, Artificial Sequence
  Synthetically generated peptide
  VARIANT (1)..(17): Xaa = Any Amino Acid
ACEWCANPXACTXXXGC

SEQ ID NO: 14605 - protein, 17 aa, Artificial Sequence
  Synthetically generated peptide
  VARIANT (1)..(17): Xaa = Any Amino Acid
ACEWCANPXACTXXGXC

SEQ ID NO: 14606 - protein, 16 aa, Artificial Sequence
  Synthetically generated peptide
  VARIANT (1)..(16): Xaa = Any Amino Acid
ACEWCANPXACTXGXC

SEQ ID NO: 14607 - protein, 17 aa, Artificial Sequence
  Synthetically generated peptide
  VARIANT (1)..(17): Xaa = Any Amino Acid
ACEWCANPXACTXGXXC

SEQ ID NO: 14608 - protein, 15 aa, Artificial Sequence
  Synthetically generated peptide
  VARIANT (1)..(15): Xaa = Any Amino Acid
ACEWCANPXACTGXC

SEQ ID NO: 14609 - protein, 16 aa, Artificial Sequence
  Synthetically generated peptide
  VARIANT (1)..(16): Xaa = Any Amino Acid
ACEWCANPXACTGXXC

SEQ ID NO: 14610 - protein, 17 aa, Artificial Sequence
  Synthetically generated peptide
  VARIANT (1)..(17): Xaa = Any Amino Acid
ACEWCANPXACTGXXXC

SEQ ID NO: 14611 - protein, 14 aa, Artificial Sequence
  Synthetically generated peptide
  VARIANT (1)..(14): Xaa = Any Amino Acid
ACEWCANPAXCTGC

SEQ ID NO: 14612 - protein, 15 aa, Artificial Sequence
  Synthetically generated peptide
  VARIANT (1)..(15): Xaa = Any Amino Acid
ACEWCANPAXXCTGC

SEQ ID NO: 14613 - protein, 16 aa, Artificial Sequence
  Synthetically generated peptide
  VARIANT (1)..(16): Xaa = Any Amino Acid
ACEWCANPAXXXCTGC

SEQ ID NO: 14614 - protein, 17 aa, Artificial Sequence
  Synthetically generated peptide
  VARIANT (1)..(17): Xaa = Any Amino Acid
ACEWCANPAXXXXCTGC

SEQ ID NO: 14615 - protein, 17 aa, Artificial Sequence
  Synthetically generated peptide
  VARIANT (1)..(17): Xaa = Any Amino Acid
ACEWCANPAXXXCXTGC

SEQ ID NO: 14616 - protein, 17 aa, Artificial Sequence
  Synthetically generated peptide
  VARIANT (1)..(17): Xaa = Any Amino Acid
ACEWCANPAXXXCTXGC

SEQ ID NO: 14617 - protein, 17 aa, Artificial Sequence
  Synthetically generated peptide
  VARIANT (1)..(17): Xaa = Any Amino Acid
ACEWCANPAXXXCTGXC

SEQ ID NO: 14618 - protein, 16 aa, Artificial Sequence
  Synthetically generated peptide
  VARIANT (1)..(16): Xaa = Any Amino Acid
ACEWCANPAXXCXTGC

SEQ ID NO: 14619 - protein, 17 aa, Artificial Sequence
  Synthetically generated peptide
  VARIANT (1)..(17): Xaa = Any Amino Acid
ACEWCANPAXXCXXTGC

SEQ ID NO: 14620 - protein, 17 aa, Artificial Sequence
  Synthetically generated peptide
  VARIANT (1)..(17): Xaa = Any Amino Acid
ACEWCANPAXXCXTXGC

SEQ ID NO: 14621 - protein, 17 aa, Artificial Sequence
  Synthetically generated peptide
  VARIANT (1)..(17): Xaa = Any Amino Acid
ACEWCANPAXXCXTGXC

SEQ ID NO: 14622 - protein, 16 aa, Artificial Sequence
  Synthetically generated peptide
  VARIANT (1)..(16): Xaa = Any Amino Acid
ACEWCANPAXXCTXGC

SEQ ID NO: 14623 - protein, 17 aa, Artificial Sequence
  Synthetically generated peptide
  VARIANT (1)..(17): Xaa = Any Amino Acid
ACEWCANPAXXCTXXGC

SEQ ID NO: 14624 - protein, 17 aa, Artificial Sequence
  Synthetically generated peptide
  VARIANT (1)..(17): Xaa = Any Amino Acid
ACEWCANPAXXCTXGXC

SEQ ID NO: 14625 - protein, 16 aa, Artificial Sequence
  Synthetically generated peptide
  VARIANT (1)..(16): Xaa = Any Amino Acid
ACEWCANPAXXCTGXC

SEQ ID NO: 14626 - protein, 17 aa, Artificial Sequence
  Synthetically generated peptide
  VARIANT (1)..(17): Xaa = Any Amino Acid
ACEWCANPAXXCTGXXC

SEQ ID NO: 14627 - protein, 15 aa, Artificial Sequence
  Synthetically generated peptide
  VARIANT (1)..(15): Xaa = Any Amino Acid
ACEWCANPAXCXTGC

SEQ ID NO: 14628 - protein, 16 aa, Artificial Sequence
  Synthetically generated peptide
  VARIANT (1)..(16): Xaa = Any Amino Acid
ACEWCANPAXCXXTGC

SEQ ID NO: 14629 - protein, 17 aa, Artificial Sequence
  Synthetically generated peptide
  VARIANT (1)..(17): Xaa = Any Amino Acid
ACEWCANPAXCXXXTGC

SEQ ID NO: 14630 - protein, 17 aa, Artificial Sequence
  Synthetically generated peptide
  VARIANT (1)..(17): Xaa = Any Amino Acid
ACEWCANPAXCXXTXGC

SEQ ID NO: 14631 - protein, 17 aa, Artificial Sequence
  Synthetically generated peptide
  VARIANT (1)..(17): Xaa = Any Amino Acid
ACEWCANPAXCXXTGXC

SEQ ID NO: 14632 - protein, 16 aa, Artificial Sequence
  Synthetically generated peptide
  VARIANT (1)..(16): Xaa = Any Amino Acid
ACEWCANPAXCXTXGC

SEQ ID NO: 14633 - protein, 17 aa, Artificial Sequence
  Synthetically generated peptide
  VARIANT (1)..(17): Xaa = Any Amino Acid
ACEWCANPAXCXTXXGC

SEQ ID NO: 14634 - protein, 17 aa, Artificial Sequence
  Synthetically generated peptide
  VARIANT (1)..(17): Xaa = Any Amino Acid
ACEWCANPAXCXTXGXC

SEQ ID NO: 14635 - protein, 16 aa, Artificial Sequence
  Synthetically generated peptide
  VARIANT (1)..(16): Xaa = Any Amino Acid
ACEWCANPAXCXTGXC

SEQ ID NO: 14636 - protein, 17 aa, Artificial Sequence
  Synthetically generated peptide
  VARIANT (1)..(17): Xaa = Any Amino Acid
ACEWCANPAXCXTGXXC

SEQ ID NO: 14637 - protein, 15 aa, Artificial Sequence
  Synthetically generated peptide
  VARIANT (1)..(15): Xaa = Any Amino Acid
ACEWCANPAXCTXGC

SEQ ID NO: 14638 - protein, 16 aa, Artificial Sequence
  Synthetically generated peptide
  VARIANT (1)..(16): Xaa = Any Amino Acid
ACEWCANPAXCTXXGC

SEQ ID NO: 14639 - protein, 17 aa, Artificial Sequence
  Synthetically generated peptide
  VARIANT (1)..(17): Xaa = Any Amino Acid
ACEWCANPAXCTXXXGC

SEQ ID NO: 14640 - protein, 17 aa, Artificial Sequence
  Synthetically generated peptide
  VARIANT (1)..(17): Xaa = Any Amino Acid
ACEWCANPAXCTXXGXC

SEQ ID NO: 14641 - protein, 16 aa, Artificial Sequence
  Synthetically generated peptide
  VARIANT (1)..(16): Xaa = Any Amino Acid
ACEWCANPAXCTXGXC

SEQ ID NO: 14642 - protein, 17 aa, Artificial Sequence
  Synthetically generated peptide
  VARIANT (1)..(17): Xaa = Any Amino Acid
ACEWCANPAXCTXGXXC

SEQ ID NO: 14643 - protein, 15 aa, Artificial Sequence
  Synthetically generated peptide
  VARIANT (1)..(15): Xaa = Any Amino Acid
ACEWCANPAXCTGXC

SEQ ID NO: 14644 - protein, 16 aa, Artificial Sequence
  Synthetically generated peptide
  VARIANT (1)..(16): Xaa = Any Amino Acid
ACEWCANPAXCTGXXC

SEQ ID NO: 14645 - protein, 17 aa, Artificial Sequence
  Synthetically generated peptide
  VARIANT (1)..(17): Xaa = Any Amino Acid
ACEWCANPAXCTGXXXC

SEQ ID NO: 14646 - protein, 14 aa, Artificial Sequence
  Synthetically generated peptide
  VARIANT (1)..(14): Xaa = Any Amino Acid
ACEWCANPACXTGC

SEQ ID NO: 14647 - protein, 15 aa, Artificial Sequence
  Synthetically generated peptide
  VARIANT (1)..(15): Xaa = Any Amino Acid
ACEWCANPACXXTGC

SEQ ID NO: 14648 - protein, 16 aa, Artificial Sequence
  Synthetically generated peptide
  VARIANT (1)..(16): Xaa = Any Amino Acid
ACEWCANPACXXXTGC

SEQ ID NO: 14649 - protein, 17 aa, Artificial Sequence
  Synthetically generated peptide
  VARIANT (1)..(17): Xaa = Any Amino Acid
ACEWCANPACXXXXTGC

SEQ ID NO: 14650 - protein, 17 aa, Artificial Sequence
  Synthetically generated peptide
  VARIANT (1)..(17): Xaa = Any Amino Acid
ACEWCANPACXXXTXGC

SEQ ID NO: 14651 - protein, 17 aa, Artificial Sequence
  Synthetically generated peptide
  VARIANT (1)..(17): Xaa = Any Amino Acid
ACEWCANPACXXXTGXC

SEQ ID NO: 14652 - protein, 16 aa, Artificial Sequence
  Synthetically generated peptide
  VARIANT (1)..(16): Xaa = Any Amino Acid
ACEWCANPACXXTXGC

SEQ ID NO: 14653 - protein, 17 aa, Artificial Sequence
  Synthetically generated peptide
  VARIANT (1)..(17): Xaa = Any Amino Acid
ACEWCANPACXXTXXGC

SEQ ID NO: 14654 - protein, 17 aa, Artificial Sequence
  Synthetically generated peptide
  VARIANT (1)..(17): Xaa = Any Amino Acid
ACEWCANPACXXTXGXC

SEQ ID NO: 14655 - protein, 16 aa, Artificial Sequence
  Synthetically generated peptide
  VARIANT (1)..(16): Xaa = Any Amino Acid
ACEWCANPACXXTGXC

SEQ ID NO: 14656 - protein, 17 aa, Artificial Sequence
  Synthetically generated peptide
  VARIANT (1)..(17): Xaa = Any Amino Acid
ACEWCANPACXXTGXXC

SEQ ID NO: 14657 - protein, 15 aa, Artificial Sequence
  Synthetically generated peptide
  VARIANT (1)..(15): Xaa = Any Amino Acid
ACEWCANPACXTXGC

SEQ ID NO: 14658 - protein, 16 aa, Artificial Sequence
  Synthetically generated peptide
  VARIANT (1)..(16): Xaa = Any Amino Acid
ACEWCANPACXTXXGC

SEQ ID NO: 14659 - protein, 17 aa, Artificial Sequence
  Synthetically generated peptide
  VARIANT (1)..(17): Xaa = Any Amino Acid
ACEWCANPACXTXXXGC

SEQ ID NO: 14660 - protein, 17 aa, Artificial Sequence
  Synthetically generated peptide
  VARIANT (1)..(17): Xaa = Any Amino Acid
ACEWCANPACXTXXGXC

SEQ ID NO: 14661 - protein, 16 aa, Artificial Sequence
  Synthetically generated peptide
  VARIANT (1)..(16): Xaa = Any Amino Acid
ACEWCANPACXTXGXC

SEQ ID NO: 14662 - protein, 17 aa, Artificial Sequence
  Synthetically generated peptide
  VARIANT (1)..(17): Xaa = Any Amino Acid
ACEWCANPACXTXGXXC

SEQ ID NO: 14663 - protein, 15 aa, Artificial Sequence
  Synthetically generated peptide
  VARIANT (1)..(15): Xaa = Any Amino Acid
ACEWCANPACXTGXC

SEQ ID NO: 14664 - protein, 16 aa, Artificial Sequence
  Synthetically generated peptide
  VARIANT (1)..(16): Xaa = Any Amino Acid
ACEWCANPACXTGXXC

SEQ ID NO: 14665 - protein, 17 aa, Artificial Sequence
  Synthetically generated peptide
  VARIANT (1)..(17): Xaa = Any Amino Acid
ACEWCANPACXTGXXXC

SEQ ID NO: 14666 - protein, 14 aa, Artificial Sequence
  Synthetically generated peptide
  VARIANT (1)..(14): Xaa = Any Amino Acid
ACEWCANPACTXGC

SEQ ID NO: 14667 - protein, 15 aa, Artificial Sequence
  Synthetically generated peptide
  VARIANT (1)..(15): Xaa = Any Amino Acid
ACEWCANPACTXXGC

SEQ ID NO: 14668 - protein, 16 aa, Artificial Sequence
  Synthetically generated peptide
  VARIANT (1)..(16): Xaa = Any Amino Acid
ACEWCANPACTXXXGC

SEQ ID NO: 14669 - protein, 17 aa, Artificial Sequence
  Synthetically generated peptide
  VARIANT (1)..(17): Xaa = Any Amino Acid
ACEWCANPACTXXXXGC

SEQ ID NO: 14670 - protein, 17 aa, Artificial Sequence
  Synthetically generated peptide
  VARIANT (1)..(17): Xaa = Any Amino Acid
ACEWCANPACTXXXGXC

SEQ ID NO: 14671 - protein, 16 aa, Artificial Sequence
  Synthetically generated peptide
  VARIANT (1)..(16): Xaa = Any Amino Acid
ACEWCANPACTXXGXC

SEQ ID NO: 14672 - protein, 17 aa, Artificial Sequence
  Synthetically generated peptide
  VARIANT (1)..(17): Xaa = Any Amino Acid
ACEWCANPACTXXGXXC

SEQ ID NO: 14673 - protein, 15 aa, Artificial Sequence
  Synthetically generated peptide
  VARIANT (1)..(15): Xaa = Any Amino Acid
ACEWCANPACTXGXC

SEQ ID NO: 14674 - protein, 16 aa, Artificial Sequence
  Synthetically generated peptide
  VARIANT (1)..(16): Xaa = Any Amino Acid
ACEWCANPACTXGXXC

SEQ ID NO: 14675 - protein, 17 aa, Artificial Sequence
  Synthetically generated peptide
  VARIANT (1)..(17): Xaa = Any Amino Acid
ACEWCANPACTXGXXXC

SEQ ID NO: 14676 - protein, 14 aa, Artificial Sequence
  Synthetically generated peptide
  VARIANT (1)..(14): Xaa = Any Amino Acid
ACEWCANPACTGXC

SEQ ID NO: 14677 - protein, 15 aa, Artificial Sequence
  Synthetically generated peptide
  VARIANT (1)..(15): Xaa = Any Amino Acid
ACEWCANPACTGXXC

SEQ ID NO: 14678 - protein, 16 aa, Artificial Sequence
  Synthetically generated peptide
  VARIANT (1)..(16): Xaa = Any Amino Acid
ACEWCANPACTGXXXC

SEQ ID NO: 14679 - protein, 17 aa, Artificial Sequence
  Synthetically generated peptide
  VARIANT (1)..(17): Xaa = Any Amino Acid
ACEWCANPACTGXXXXC

SEQ ID NO: 14680 - protein, 14 aa, Artificial Sequence
  Synthetically generated peptide
  VARIANT (1)..(14): Xaa = Any Amino Acid
CCXEWACNPACTGA

SEQ ID NO: 14681 - protein, 15 aa, Artificial Sequence
  Synthetically generated peptide
  VARIANT (1)..(15): Xaa = Any Amino Acid
CCXXEWACNPACTGA

SEQ ID NO: 14682 - protein, 16 aa, Artificial Sequence
  Synthetically generated peptide
  VARIANT (1)..(16): Xaa = Any Amino Acid
CCXXXEWACNPACTGA

SEQ ID NO: 14683 - protein, 17 aa, Artificial Sequence
  Synthetically generated peptide
  VARIANT (1)..(17): Xaa = Any Amino Acid
CCXXXXEWACNPACTGA

SEQ ID NO: 14684 - protein, 17 aa, Artificial Sequence
  Synthetically generated peptide
  VARIANT (1)..(17): Xaa = Any Amino Acid
CCXXXEXWACNPACTGA

SEQ ID NO: 14685 - protein, 17 aa, Artificial Sequence
  Synthetically generated peptide
  VARIANT (1)..(17): Xaa = Any Amino Acid
CCXXXEWXACNPACTGA

SEQ ID NO: 14686 - protein, 17 aa, Artificial Sequence
  Synthetically generated peptide
  VARIANT (1)..(17): Xaa = Any Amino Acid
CCXXXEWACXNPACTGA

SEQ ID NO: 14687 - protein, 17 aa, Artificial Sequence
  Synthetically generated peptide
  VARIANT (1)..(17): Xaa = Any Amino Acid
CCXXXEWACNXPACTGA

SEQ ID NO: 14688 - protein, 17 aa, Artificial Sequence
  Synthetically generated peptide
  VARIANT (1)..(17): Xaa = Any Amino Acid
CCXXXEWACNPXACTGA

SEQ ID NO: 14689 - protein, 17 aa, Artificial Sequence
  Synthetically generated peptide
  VARIANT (1)..(17): Xaa = Any Amino Acid
CCXXXEWACNPAXCTGA

SEQ ID NO: 14690 - protein, 17 aa, Artificial Sequence
  Synthetically generated peptide
  VARIANT (1)..(17): Xaa = Any Amino Acid
CCXXXEWACNPACXTGA

SEQ ID NO: 14691 - protein, 17 aa, Artificial Sequence
  Synthetically generated peptide
  VARIANT (1)..(17): Xaa = Any Amino Acid
CCXXXEWACNPACTXGA

SEQ ID NO: 14692 - protein, 17 aa, Artificial Sequence
  Synthetically generated peptide
  VARIANT (1)..(17): Xaa = Any Amino Acid
CCXXXEWACNPACTGXA

SEQ ID NO: 14693 - protein, 16 aa, Artificial Sequence
  Synthetically generated peptide
  VARIANT (1)..(16): Xaa = Any Amino Acid
CCXXEXWACNPACTGA

SEQ ID NO: 14694 - protein, 17 aa, Artificial Sequence
  Synthetically generated peptide
  VARIANT (1)..(17): Xaa = Any Amino Acid
CCXXEXXWACNPACTGA

SEQ ID NO: 14695 - protein, 17 aa, Artificial Sequence
  Synthetically generated peptide
  VARIANT (1)..(17): Xaa = Any Amino Acid
CCXXEXWXACNPACTGA

SEQ ID NO: 14696 - protein, 17 aa, Artificial Sequence
  Synthetically generated peptide
  VARIANT (1)..(17): Xaa = Any Amino Acid
CCXXEXWACXNPACTGA

SEQ ID NO: 14697 - protein, 17 aa, Artificial Sequence
  Synthetically generated peptide
  VARIANT (1)..(17): Xaa = Any Amino Acid
CCXXEXWACNXPACTGA

SEQ ID NO: 14698 - protein, 17 aa, Artificial Sequence
  Synthetically generated peptide
  VARIANT (1)..(17): Xaa = Any Amino Acid
CCXXEXWACNPXACTGA

SEQ ID NO: 14699 - protein, 17 aa, Artificial Sequence
  Synthetically generated peptide
  VARIANT (1)..(17): Xaa = Any Amino Acid
CCXXEXWACNPAXCTGA

SEQ ID NO: 14700 - protein, 17 aa, Artificial Sequence
  Synthetically generated peptide
  VARIANT (1)..(17): Xaa = Any Amino Acid
CCXXEXWACNPACXTGA

SEQ ID NO: 14701 - protein, 17 aa, Artificial Sequence
  Synthetically generated peptide
  VARIANT (1)..(17): Xaa = Any Amino Acid
CCXXEXWACNPACTXGA

SEQ ID NO: 14702 - protein, 17 aa, Artificial Sequence
  Synthetically generated peptide
  VARIANT (1)..(17): Xaa = Any Amino Acid
CCXXEXWACNPACTGXA

SEQ ID NO: 14703 - protein, 16 aa, Artificial Sequence
  Synthetically generated peptide
  VARIANT (1)..(16): Xaa = Any Amino Acid
CCXXEWXACNPACTGA

SEQ ID NO: 14704 - protein, 17 aa, Artificial Sequence
  Synthetically generated peptide
  VARIANT (1)..(17): Xaa = Any Amino Acid
CCXXEWXXACNPACTGA

SEQ ID NO: 14705 - protein, 17 aa, Artificial Sequence
  Synthetically generated peptide
  VARIANT (1)..(17): Xaa = Any Amino Acid
CCXXEWXACXNPACTGA

SEQ ID NO: 14706 - protein, 17 aa, Artificial Sequence
  Synthetically generated peptide
  VARIANT (1)..(17): Xaa = Any Amino Acid
CCXXEWXACNXPACTGA

SEQ ID NO: 14707 - protein, 17 aa, Artificial Sequence
  Synthetically generated peptide
  VARIANT (1)..(17): Xaa = Any Amino Acid
CCXXEWXACNPXACTGA

SEQ ID NO: 14708 - protein, 17 aa, Artificial Sequence
  Synthetically generated peptide
  VARIANT (1)..(17): Xaa = Any Amino Acid
CCXXEWXACNPAXCTGA

SEQ ID NO: 14709 - protein, 17 aa, Artificial Sequence
  Synthetically generated peptide
  VARIANT (1)..(17): Xaa = Any Amino Acid
CCXXEWXACNPACXTGA

SEQ ID NO: 14710 - protein, 17 aa, Artificial Sequence
  Synthetically generated peptide
  VARIANT (1)..(17): Xaa = Any Amino Acid
CCXXEWXACNPACTXGA

SEQ ID NO: 14711 - protein, 17 aa, Artificial Sequence
  Synthetically generated peptide
  VARIANT (1)..(17): Xaa = Any Amino Acid
CCXXEWXACNPACTGXA

SEQ ID NO: 14712 - protein, 16 aa, Artificial Sequence
  Synthetically generated peptide
  VARIANT (1)..(16): Xaa = Any Amino Acid
CCXXEWACXNPACTGA

SEQ ID NO: 14713 - protein, 17 aa, Artificial Sequence
  Synthetically generated peptide
  VARIANT (1)..(17): Xaa = Any Amino Acid
CCXXEWACXXNPACTGA

SEQ ID NO: 14714 - protein, 17 aa, Artificial Sequence
  Synthetically generated peptide
  VARIANT (1)..(17): Xaa = Any Amino Acid
CCXXEWACXNXPACTGA

SEQ ID NO: 14715 - protein, 17 aa, Artificial Sequence
  Synthetically generated peptide
  VARIANT (1)..(17): Xaa = Any Amino Acid
CCXXEWACXNPXACTGA

SEQ ID NO: 14716 - protein, 17 aa, Artificial Sequence
  Synthetically generated peptide
  VARIANT (1)..(17): Xaa = Any Amino Acid
CCXXEWACXNPAXCTGA

SEQ ID NO: 14717 - protein, 17 aa, Artificial Sequence
  Synthetically generated peptide
  VARIANT (1)..(17): Xaa = Any Amino Acid
CCXXEWACXNPACXTGA

SEQ ID NO: 14718 - protein, 17 aa, Artificial Sequence
  Synthetically generated peptide
  VARIANT (1)..(17): Xaa = Any Amino Acid
CCXXEWACXNPACTXGA

SEQ ID NO: 14719 - protein, 17 aa, Artificial Sequence
  Synthetically generated peptide
  VARIANT (1)..(17): Xaa = Any Amino Acid
CCXXEWACXNPACTGXA

SEQ ID NO: 14720 - protein, 16 aa, Artificial Sequence
  Synthetically generated peptide
  VARIANT (1)..(16): Xaa = Any Amino Acid
CCXXEWACNXPACTGA

SEQ ID NO: 14721 - protein, 17 aa, Artificial Sequence
  Synthetically generated peptide
  VARIANT (1)..(17): Xaa = Any Amino Acid
CCXXEWACNXXPACTGA

SEQ ID NO: 14722 - protein, 17 aa, Artificial Sequence
  Synthetically generated peptide
  VARIANT (1)..(17): Xaa = Any Amino Acid
CCXXEWACNXPXACTGA

SEQ ID NO: 14723 - protein, 17 aa, Artificial Sequence
  Synthetically generated peptide
  VARIANT (1)..(17): Xaa = Any Amino Acid
CCXXEWACNXPAXCTGA

SEQ ID NO: 14724 - protein, 17 aa, Artificial Sequence
  Synthetically generated peptide
  VARIANT (1)..(17): Xaa = Any Amino Acid
CCXXEWACNXPACXTGA

SEQ ID NO: 14725 - protein, 17 aa, Artificial Sequence
  Synthetically generated peptide
  VARIANT (1)..(17): Xaa = Any Amino Acid
CCXXEWACNXPACTXGA

SEQ ID NO: 14726 - protein, 17 aa, Artificial Sequence
  Synthetically generated peptide
  VARIANT (1)..(17): Xaa = Any Amino Acid
CCXXEWACNXPACTGXA

SEQ ID NO: 14727 - protein, 16 aa, Artificial Sequence
  Synthetically generated peptide
  VARIANT (1)..(16): Xaa = Any Amino Acid
CCXXEWACNPXACTGA

SEQ ID NO: 14728 - protein, 17 aa, Artificial Sequence
  Synthetically generated peptide
  VARIANT (1)..(17): Xaa = Any Amino Acid
CCXXEWACNPXXACTGA

SEQ ID NO: 14729 - protein, 17 aa, Artificial Sequence
  Synthetically generated peptide
  VARIANT (1)..(17): Xaa = Any Amino Acid
CCXXEWACNPXAXCTGA

SEQ ID NO: 14730 - protein, 17 aa, Artificial Sequence
  Synthetically generated peptide
  VARIANT (1)..(17): Xaa = Any Amino Acid
CCXXEWACNPXACXTGA

SEQ ID NO: 14731 - protein, 17 aa, Artificial Sequence
  Synthetically generated peptide
  VARIANT (1)..(17): Xaa = Any Amino Acid
CCXXEWACNPXACTXGA

SEQ ID NO: 14732 - protein, 17 aa, Artificial Sequence
  Synthetically generated peptide
  VARIANT (1)..(17): Xaa = Any Amino Acid
CCXXEWACNPXACTGXA

SEQ ID NO: 14733 - protein, 16 aa, Artificial Sequence
  Synthetically generated peptide
  VARIANT (1)..(16): Xaa = Any Amino Acid
CCXXEWACNPAXCTGA

SEQ ID NO: 14734 - protein, 17 aa, Artificial Sequence
  Synthetically generated peptide
  VARIANT (1)..(17): Xaa = Any Amino Acid
CCXXEWACNPAXXCTGA

SEQ ID NO: 14735 - protein, 17 aa, Artificial Sequence
  Synthetically generated peptide
  VARIANT (1)..(17): Xaa = Any Amino Acid
CCXXEWACNPAXCXTGA

SEQ ID NO: 14736 - protein, 17 aa, Artificial Sequence
  Synthetically generated peptide
  VARIANT (1)..(17): Xaa = Any Amino Acid
CCXXEWACNPAXCTXGA

SEQ ID NO: 14737 - protein, 17 aa, Artificial Sequence
  Synthetically generated peptide
  VARIANT (1)..(17): Xaa = Any Amino Acid
CCXXEWACNPAXCTGXA

SEQ ID NO: 14738 - protein, 16 aa, Artificial Sequence
  Synthetically generated peptide
  VARIANT (1)..(16): Xaa = Any Amino Acid
CCXXEWACNPACXTGA

SEQ ID NO: 14739 - protein, 17 aa, Artificial Sequence
  Synthetically generated peptide
  VARIANT (1)..(17): Xaa = Any Amino Acid
CCXXEWACNPACXXTGA

SEQ ID NO: 14740 - protein, 17 aa, Artificial Sequence
  Synthetically generated peptide
  VARIANT (1)..(17): Xaa = Any Amino Acid
CCXXEWACNPACXTXGA

SEQ ID NO: 14741 - protein, 17 aa, Artificial Sequence
  Synthetically generated peptide
  VARIANT (1)..(17): Xaa = Any Amino Acid
CCXXEWACNPACXTGXA

SEQ ID NO: 14742 - protein, 16 aa, Artificial Sequence
  Synthetically generated peptide
  VARIANT (1)..(16): Xaa = Any Amino Acid
CCXXEWACNPACTXGA

SEQ ID NO: 14743 - protein, 17 aa, Artificial Sequence
  Synthetically generated peptide
  VARIANT (1)..(17): Xaa = Any Amino Acid
CCXXEWACNPACTXXGA

SEQ ID NO: 14744 - protein, 17 aa, Artificial Sequence
  Synthetically generated peptide
  VARIANT (1)..(17): Xaa = Any Amino Acid
CCXXEWACNPACTXGXA

SEQ ID NO: 14745 - protein, 16 aa, Artificial Sequence
  Synthetically generated peptide
  VARIANT (1)..(16): Xaa = Any Amino Acid
CCXXEWACNPACTGXA

SEQ ID NO: 14746 - protein, 17 aa, Artificial Sequence
  Synthetically generated peptide
  VARIANT (1)..(17): Xaa = Any Amino Acid
CCXXEWACNPACTGXXA

SEQ ID NO: 14747 - protein, 15 aa, Artificial Sequence
  Synthetically generated peptide
  VARIANT (1)..(15): Xaa = Any Amino Acid
CCXEXWACNPACTGA

SEQ ID NO: 14748 - protein, 16 aa, Artificial Sequence
  Synthetically generated peptide
  VARIANT (1)..(16): Xaa = Any Amino Acid
CCXEXXWACNPACTGA

SEQ ID NO: 14749 - protein, 17 aa, Artificial Sequence
  Synthetically generated peptide
  VARIANT (1)..(17): Xaa = Any Amino Acid
CCXEXXXWACNPACTGA

SEQ ID NO: 14750 - protein, 17 aa, Artificial Sequence
  Synthetically generated peptide
  VARIANT (1)..(17): Xaa = Any Amino Acid
CCXEXXWXACNPACTGA

SEQ ID NO: 14751 - protein, 17 aa, Artificial Sequence
  Synthetically generated peptide
  VARIANT (1)..(17): Xaa = Any Amino Acid
CCXEXXWACXNPACTGA

SEQ ID NO: 14752 - protein, 17 aa, Artificial Sequence
  Synthetically generated peptide
  VARIANT (1)..(17): Xaa = Any Amino Acid
CCXEXXWACNXPACTGA

SEQ ID NO: 14753 - protein, 17 aa, Artificial Sequence
  Synthetically generated peptide
  VARIANT (1)..(17): Xaa = Any Amino Acid
CCXEXXWACNPXACTGA

SEQ ID NO: 14754 - protein, 17 aa, Artificial Sequence
  Synthetically generated peptide
  VARIANT (1)..(17): Xaa = Any Amino Acid
CCXEXXWACNPAXCTGA

SEQ ID NO: 14755 - protein, 17 aa, Artificial Sequence
  Synthetically generated peptide
  VARIANT (1)..(17): Xaa = Any Amino Acid
CCXEXXWACNPACXTGA

SEQ ID NO: 14756 - protein, 17 aa, Artificial Sequence
  Synthetically generated peptide
  VARIANT (1)..(17): Xaa = Any Amino Acid
CCXEXXWACNPACTXGA

SEQ ID NO: 14757 - protein, 17 aa, Artificial Sequence
  Synthetically generated peptide
  VARIANT (1)..(17): Xaa = Any Amino Acid
CCXEXXWACNPACTGXA

SEQ ID NO: 14758 - protein, 16 aa, Artificial Sequence
  Synthetically generated peptide
  VARIANT (1)..(16): Xaa = Any Amino Acid
CCXEXWXACNPACTGA

SEQ ID NO: 14759 - protein, 17 aa, Artificial Sequence
  Synthetically generated peptide
  VARIANT (1)..(17): Xaa = Any Amino Acid
CCXEXWXXACNPACTGA

SEQ ID NO: 14760 - protein, 17 aa, Artificial Sequence
  Synthetically generated peptide
  VARIANT (1)..(17): Xaa = Any Amino Acid
CCXEXWXACXNPACTGA

SEQ ID NO: 14761 - protein, 17 aa, Artificial Sequence
  Synthetically generated peptide
  VARIANT (1)..(17): Xaa = Any Amino Acid
CCXEXWXACNXPACTGA

SEQ ID NO: 14762 - protein, 17 aa, Artificial Sequence
  Synthetically generated peptide
  VARIANT (1)..(17): Xaa = Any Amino Acid
CCXEXWXACNPXACTGA

SEQ ID NO: 14763 - protein, 17 aa, Artificial Sequence
  Synthetically generated peptide
  VARIANT (1)..(17): Xaa = Any Amino Acid
CCXEXWXACNPAXCTGA

SEQ ID NO: 14764 - protein, 17 aa, Artificial Sequence
  Synthetically generated peptide
  VARIANT (1)..(17): Xaa = Any Amino Acid
CCXEXWXACNPACXTGA

SEQ ID NO: 14765 - protein, 17 aa, Artificial Sequence
  Synthetically generated peptide
  VARIANT (1)..(17): Xaa = Any Amino Acid
CCXEXWXACNPACTXGA

SEQ ID NO: 14766 - protein, 17 aa, Artificial Sequence
  Synthetically generated peptide
  VARIANT (1)..(17): Xaa = Any Amino Acid
CCXEXWXACNPACTGXA

SEQ ID NO: 14767 - protein, 16 aa, Artificial Sequence
  Synthetically generated peptide
  VARIANT (1)..(16): Xaa = Any Amino Acid
CCXEXWACXNPACTGA

SEQ ID NO: 14768 - protein, 17 aa, Artificial Sequence
  Synthetically generated peptide
  VARIANT (1)..(17): Xaa = Any Amino Acid
CCXEXWACXXNPACTGA

SEQ ID NO: 14769 - protein, 17 aa, Artificial Sequence
  Synthetically generated peptide
  VARIANT (1)..(17): Xaa = Any Amino Acid
CCXEXWACXNXPACTGA

SEQ ID NO: 14770 - protein, 17 aa, Artificial Sequence
  Synthetically generated peptide
  VARIANT (1)..(17): Xaa = Any Amino Acid
CCXEXWACXNPXACTGA

SEQ ID NO: 14771 - protein, 17 aa, Artificial Sequence
  Synthetically generated peptide
  VARIANT (1)..(17): Xaa = Any Amino Acid
CCXEXWACXNPAXCTGA

SEQ ID NO: 14772 - protein, 17 aa, Artificial Sequence
  Synthetically generated peptide
  VARIANT (1)..(17): Xaa = Any Amino Acid
CCXEXWACXNPACXTGA

SEQ ID NO: 14773 - protein, 17 aa, Artificial Sequence
  Synthetically generated peptide
  VARIANT (1)..(17): Xaa = Any Amino Acid
CCXEXWACXNPACTXGA

SEQ ID NO: 14774 - protein, 17 aa, Artificial Sequence
  Synthetically generated peptide
  VARIANT (1)..(17): Xaa = Any Amino Acid
CCXEXWACXNPACTGXA

SEQ ID NO: 14775 - protein, 16 aa, Artificial Sequence
  Synthetically generated peptide
  VARIANT (1)..(16): Xaa = Any Amino Acid
CCXEXWACNXPACTGA

SEQ ID NO: 14776 - protein, 17 aa, Artificial Sequence
  Synthetically generated peptide
  VARIANT (1)..(17): Xaa = Any Amino Acid
CCXEXWACNXXPACTGA

SEQ ID NO: 14777 - protein, 17 aa, Artificial Sequence
  Synthetically generated peptide
  VARIANT (1)..(17): Xaa = Any Amino Acid
CCXEXWACNXPXACTGA

SEQ ID NO: 14778 - protein, 17 aa, Artificial Sequence
  Synthetically generated peptide
  VARIANT (1)..(17): Xaa = Any Amino Acid
CCXEXWACNXPAXCTGA

SEQ ID NO: 14779 - protein, 17 aa, Artificial Sequence
  Synthetically generated peptide
  VARIANT (1)..(17): Xaa = Any Amino Acid
CCXEXWACNXPACXTGA

SEQ ID NO: 14780 - protein, 17 aa, Artificial Sequence
  Synthetically generated peptide
  VARIANT (1)..(17): Xaa = Any Amino Acid
CCXEXWACNXPACTXGA

SEQ ID NO: 14781 - protein, 17 aa, Artificial Sequence
  Synthetically generated peptide
  VARIANT (1)..(17): Xaa = Any Amino Acid
CCXEXWACNXPACTGXA

SEQ ID NO: 14782 - protein, 16 aa, Artificial Sequence
  Synthetically generated peptide
  VARIANT (1)..(16): Xaa = Any Amino Acid
CCXEXWACNPXACTGA

SEQ ID NO: 14783 - protein, 17 aa, Artificial Sequence
  Synthetically generated peptide
  VARIANT (1)..(17): Xaa = Any Amino Acid
CCXEXWACNPXXACTGA

SEQ ID NO: 14784 - protein, 17 aa, Artificial Sequence
  Synthetically generated peptide
  VARIANT (1)..(17): Xaa = Any Amino Acid
CCXEXWACNPXAXCTGA

SEQ ID NO: 14785 - protein, 17 aa, Artificial Sequence
  Synthetically generated peptide
  VARIANT (1)..(17): Xaa = Any Amino Acid
CCXEXWACNPXACXTGA

SEQ ID NO: 14786 - protein, 17 aa, Artificial Sequence
  Synthetically generated peptide
  VARIANT (1)..(17): Xaa = Any Amino Acid
CCXEXWACNPXACTXGA

SEQ ID NO: 14787 - protein, 17 aa, Artificial Sequence
  Synthetically generated peptide
  VARIANT (1)..(17): Xaa = Any Amino Acid
CCXEXWACNPXACTGXA

SEQ ID NO: 14788 - protein, 16 aa, Artificial Sequence
  Synthetically generated peptide
  VARIANT (1)..(16): Xaa = Any Amino Acid
CCXEXWACNPAXCTGA

SEQ ID NO: 14789 - protein, 17 aa, Artificial Sequence
  Synthetically generated peptide
  VARIANT (1)..(17): Xaa = Any Amino Acid
CCXEXWACNPAXXCTGA

SEQ ID NO: 14790 - protein, 17 aa, Artificial Sequence
  Synthetically generated peptide
  VARIANT (1)..(17): Xaa = Any Amino Acid
CCXEXWACNPAXCXTGA

SEQ ID NO: 14791 - protein, 17 aa, Artificial Sequence
  Synthetically generated peptide
  VARIANT (1)..(17): Xaa = Any Amino Acid
CCXEXWACNPAXCTXGA

SEQ ID NO: 14792 - protein, 17 aa, Artificial Sequence
  Synthetically generated peptide
  VARIANT (1)..(17): Xaa = Any Amino Acid
CCXEXWACNPAXCTGXA

SEQ ID NO: 14793 - protein, 16 aa, Artificial Sequence
  Synthetically generated peptide
  VARIANT (1)..(16): Xaa = Any Amino Acid
CCXEXWACNPACXTGA

SEQ ID NO: 14794 - protein, 17 aa, Artificial Sequence
  Synthetically generated peptide
  VARIANT (1)..(17): Xaa = Any Amino Acid
CCXEXWACNPACXXTGA

SEQ ID NO: 14795 - protein, 17 aa, Artificial Sequence
  Synthetically generated peptide
  VARIANT (1)..(17): Xaa = Any Amino Acid
CCXEXWACNPACXTXGA

SEQ ID NO: 14796 - protein, 17 aa, Artificial Sequence
  Synthetically generated peptide
  VARIANT (1)..(17): Xaa = Any Amino Acid
CCXEXWACNPACXTGXA

SEQ ID NO: 14797 - protein, 16 aa, Artificial Sequence
  Synthetically generated peptide
  VARIANT (1)..(16): Xaa = Any Amino Acid
CCXEXWACNPACTXGA

SEQ ID NO: 14798 - protein, 17 aa, Artificial Sequence
  Synthetically generated peptide
  VARIANT (1)..(17): Xaa = Any Amino Acid
CCXEXWACNPACTXXGA

SEQ ID NO: 14799 - protein, 17 aa, Artificial Sequence
  Synthetically generated peptide
  VARIANT (1)..(17): Xaa = Any Amino Acid
CCXEXWACNPACTXGXA

SEQ ID NO: 14800 - protein, 16 aa, Artificial Sequence
  Synthetically generated peptide
  VARIANT (1)..(16): Xaa = Any Amino Acid
CCXEXWACNPACTGXA

SEQ ID NO: 14801 - protein, 17 aa, Artificial Sequence
  Synthetically generated peptide
  VARIANT (1)..(17): Xaa = Any Amino Acid
CCXEXWACNPACTGXXA

SEQ ID NO: 14802 - protein, 15 aa, Artificial Sequence
  Synthetically generated peptide
  VARIANT (1)..(15): Xaa = Any Amino Acid
CCXEWXACNPACTGA

SEQ ID NO: 14803 - protein, 16 aa, Artificial Sequence
  Synthetically generated peptide
  VARIANT (1)..(16): Xaa = Any Amino Acid
CCXEWXXACNPACTGA

SEQ ID NO: 14804 - protein, 17 aa, Artificial Sequence
  Synthetically generated peptide
  VARIANT (1)..(17): Xaa = Any Amino Acid
CCXEWXXXACNPACTGA

SEQ ID NO: 14805 - protein, 17 aa, Artificial Sequence
  Synthetically generated peptide
  VARIANT (1)..(17): Xaa = Any Amino Acid
CCXEWXXACXNPACTGA

SEQ ID NO: 14806 - protein, 17 aa, Artificial Sequence
  Synthetically generated peptide
  VARIANT (1)..(17): Xaa = Any Amino Acid
CCXEWXXACNXPACTGA

SEQ ID NO: 14807 - protein, 17 aa, Artificial Sequence
  Synthetically generated peptide
  VARIANT (1)..(17): Xaa = Any Amino Acid
CCXEWXXACNPXACTGA

SEQ ID NO: 14808 - protein, 17 aa, Artificial Sequence
  Synthetically generated peptide
  VARIANT (1)..(17): Xaa = Any Amino Acid
CCXEWXXACNPAXCTGA

SEQ ID NO: 14809 - protein, 17 aa, Artificial Sequence
  Synthetically generated peptide
  VARIANT (1)..(17): Xaa = Any Amino Acid
CCXEWXXACNPACXTGA

SEQ ID NO: 14810 - protein, 17 aa, Artificial Sequence
  Synthetically generated peptide
  VARIANT (1)..(17): Xaa = Any Amino Acid
CCXEWXXACNPACTXGA

SEQ ID NO: 14811 - protein, 17 aa, Artificial Sequence
  Synthetically generated peptide
  VARIANT (1)..(17): Xaa = Any Amino Acid
CCXEWXXACNPACTGXA

SEQ ID NO: 14812 - protein, 16 aa, Artificial Sequence
  Synthetically generated peptide
  VARIANT (1)..(16): Xaa = Any Amino Acid
CCXEWXACXNPACTGA

SEQ ID NO: 14813 - protein, 17 aa, Artificial Sequence
  Synthetically generated peptide
  VARIANT (1)..(17): Xaa = Any Amino Acid
CCXEWXACXXNPACTGA

SEQ ID NO: 14814 - protein, 17 aa, Artificial Sequence
  Synthetically generated peptide
  VARIANT (1)..(17): Xaa = Any Amino Acid
CCXEWXACXNXPACTGA

SEQ ID NO: 14815 - protein, 17 aa, Artificial Sequence
  Synthetically generated peptide
  VARIANT (1)..(17): Xaa = Any Amino Acid
CCXEWXACXNPXACTGA

SEQ ID NO: 14816 - protein, 17 aa, Artificial Sequence
  Synthetically generated peptide
  VARIANT (1)..(17): Xaa = Any Amino Acid
CCXEWXACXNPAXCTGA

SEQ ID NO: 14817 - protein, 17 aa, Artificial Sequence
  Synthetically generated peptide
  VARIANT (1)..(17): Xaa = Any Amino Acid
CCXEWXACXNPACXTGA

SEQ ID NO: 14818 - protein, 17 aa, Artificial Sequence
  Synthetically generated peptide
  VARIANT (1)..(17): Xaa = Any Amino Acid
CCXEWXACXNPACTXGA

SEQ ID NO: 14819 - protein, 17 aa, Artificial Sequence
  Synthetically generated peptide
  VARIANT (1)..(17): Xaa = Any Amino Acid
CCXEWXACXNPACTGXA

SEQ ID NO: 14820 - protein, 16 aa, Artificial Sequence
  Synthetically generated peptide
  VARIANT (1)..(16): Xaa = Any Amino Acid
CCXEWXACNXPACTGA

SEQ ID NO: 14821 - protein, 17 aa, Artificial Sequence
  Synthetically generated peptide
  VARIANT (1)..(17): Xaa = Any Amino Acid
CCXEWXACNXXPACTGA

SEQ ID NO: 14822 - protein, 17 aa, Artificial Sequence
  Synthetically generated peptide
  VARIANT (1)..(17): Xaa = Any Amino Acid
CCXEWXACNXPXACTGA

SEQ ID NO: 14823 - protein, 17 aa, Artificial Sequence
  Synthetically generated peptide
  VARIANT (1)..(17): Xaa = Any Amino Acid
CCXEWXACNXPAXCTGA

SEQ ID NO: 14824 - protein, 17 aa, Artificial Sequence
  Synthetically generated peptide
  VARIANT (1)..(17): Xaa = Any Amino Acid
CCXEWXACNXPACXTGA

SEQ ID NO: 14825 - protein, 17 aa, Artificial Sequence
  Synthetically generated peptide
  VARIANT (1)..(17): Xaa = Any Amino Acid
CCXEWXACNXPACTXGA

SEQ ID NO: 14826 - protein, 17 aa, Artificial Sequence
  Synthetically generated peptide
  VARIANT (1)..(17): Xaa = Any Amino Acid
CCXEWXACNXPACTGXA

SEQ ID NO: 14827 - protein, 16 aa, Artificial Sequence
  Synthetically generated peptide
  VARIANT (1)..(16): Xaa = Any Amino Acid
CCXEWXACNPXACTGA

SEQ ID NO: 14828 - protein, 17 aa, Artificial Sequence
  Synthetically generated peptide
  VARIANT (1)..(17): Xaa = Any Amino Acid
CCXEWXACNPXXACTGA

SEQ ID NO: 14829 - protein, 17 aa, Artificial Sequence
  Synthetically generated peptide
  VARIANT (1)..(17): Xaa = Any Amino Acid
CCXEWXACNPXAXCTGA

SEQ ID NO: 14830 - protein, 17 aa, Artificial Sequence
  Synthetically generated peptide
  VARIANT (1)..(17): Xaa = Any Amino Acid
CCXEWXACNPXACXTGA

SEQ ID NO: 14831 - protein, 17 aa, Artificial Sequence
  Synthetically generated peptide
  VARIANT (1)..(17): Xaa = Any Amino Acid
CCXEWXACNPXACTXGA

SEQ ID NO: 14832 - protein, 17 aa, Artificial Sequence
  Synthetically generated peptide
  VARIANT (1)..(17): Xaa = Any Amino Acid
CCXEWXACNPXACTGXA

SEQ ID NO: 14833 - protein, 16 aa, Artificial Sequence
  Synthetically generated peptide
  VARIANT (1)..(16): Xaa = Any Amino Acid
CCXEWXACNPAXCTGA

SEQ ID NO: 14834 - protein, 17 aa, Artificial Sequence
  Synthetically generated peptide
  VARIANT (1)..(17): Xaa = Any Amino Acid
CCXEWXACNPAXXCTGA

SEQ ID NO: 14835 - protein, 17 aa, Artificial Sequence
  Synthetically generated peptide
  VARIANT (1)..(17): Xaa = Any Amino Acid
CCXEWXACNPAXCXTGA

SEQ ID NO: 14836 - protein, 17 aa, Artificial Sequence
  Synthetically generated peptide
  VARIANT (1)..(17): Xaa = Any Amino Acid
CCXEWXACNPAXCTXGA

SEQ ID NO: 14837 - protein, 17 aa, Artificial Sequence
  Synthetically generated peptide
  VARIANT (1)..(17): Xaa = Any Amino Acid
CCXEWXACNPAXCTGXA

SEQ ID NO: 14838 - protein, 16 aa, Artificial Sequence
  Synthetically generated peptide
  VARIANT (1)..(16): Xaa = Any Amino Acid
CCXEWXACNPACXTGA

SEQ ID NO: 14839 - protein, 17 aa, Artificial Sequence
  Synthetically generated peptide
  VARIANT (1)..(17): Xaa = Any Amino Acid
CCXEWXACNPACXXTGA

SEQ ID NO: 14840 - protein, 17 aa, Artificial Sequence
  Synthetically generated peptide
  VARIANT (1)..(17): Xaa = Any Amino Acid
CCXEWXACNPACXTXGA

SEQ ID NO: 14841 - protein, 17 aa, Artificial Sequence
  Synthetically generated peptide
  VARIANT (1)..(17): Xaa = Any Amino Acid
CCXEWXACNPACXTGXA

SEQ ID NO: 14842 - protein, 16 aa, Artificial Sequence
  Synthetically generated peptide
  VARIANT (1)..(16): Xaa = Any Amino Acid
CCXEWXACNPACTXGA

SEQ ID NO: 14843 - protein, 17 aa, Artificial Sequence
  Synthetically generated peptide
  VARIANT (1)..(17): Xaa = Any Amino Acid
CCXEWXACNPACTXXGA

SEQ ID NO: 14844 - protein, 17 aa, Artificial Sequence
  Synthetically generated peptide
  VARIANT (1)..(17): Xaa = Any Amino Acid
CCXEWXACNPACTXGXA

SEQ ID NO: 14845 - protein, 16 aa, Artificial Sequence
  Synthetically generated peptide
  VARIANT (1)..(16): Xaa = Any Amino Acid
CCXEWXACNPACTGXA

SEQ ID NO: 14846 - protein, 17 aa, Artificial Sequence
  Synthetically generated peptide
  VARIANT (1)..(17): Xaa = Any Amino Acid
CCXEWXACNPACTGXXA

SEQ ID NO: 14847 - protein, 15 aa, Artificial Sequence
  Synthetically generated peptide
  VARIANT (1)..(15): Xaa = Any Amino Acid
CCXEWACXNPACTGA

SEQ ID NO: 14848 - protein, 16 aa, Artificial Sequence
  Synthetically generated peptide
  VARIANT (1)..(16): Xaa = Any Amino Acid
CCXEWACXXNPACTGA

SEQ ID NO: 14849 - protein, 17 aa, Artificial Sequence
  Synthetically generated peptide
  VARIANT (1)..(17): Xaa = Any Amino Acid
CCXEWACXXXNPACTGA

SEQ ID NO: 14850 - protein, 17 aa, Artificial Sequence
  Synthetically generated peptide
  VARIANT (1)..(17): Xaa = Any Amino Acid
CCXEWACXXNXPACTGA

SEQ ID NO: 14851 - protein, 17 aa, Artificial Sequence
  Synthetically generated peptide
  VARIANT (1)..(17): Xaa = Any Amino Acid
CCXEWACXXNPXACTGA

SEQ ID NO: 14852 - protein, 17 aa, Artificial Sequence
  Synthetically generated peptide
  VARIANT (1)..(17): Xaa = Any Amino Acid
CCXEWACXXNPAXCTGA

SEQ ID NO: 14853 - protein, 17 aa, Artificial Sequence
  Synthetically generated peptide
  VARIANT (1)..(17): Xaa = Any Amino Acid
CCXEWACXXNPACXTGA

SEQ ID NO: 14854 - protein, 17 aa, Artificial Sequence
  Synthetically generated peptide
  VARIANT (1)..(17): Xaa = Any Amino Acid
CCXEWACXXNPACTXGA

SEQ ID NO: 14855 - protein, 17 aa, Artificial Sequence
  Synthetically generated peptide
  VARIANT (1)..(17): Xaa = Any Amino Acid
CCXEWACXXNPACTGXA

SEQ ID NO: 14856 - protein, 16 aa, Artificial Sequence
  Synthetically generated peptide
  VARIANT (1)..(16): Xaa = Any Amino Acid
CCXEWACXNXPACTGA

SEQ ID NO: 14857 - protein, 17 aa, Artificial Sequence
  Synthetically generated peptide
  VARIANT (1)..(17): Xaa = Any Amino Acid
CCXEWACXNXXPACTGA

SEQ ID NO: 14858 - protein, 17 aa, Artificial Sequence
  Synthetically generated peptide
  VARIANT (1)..(17): Xaa = Any Amino Acid
CCXEWACXNXPXACTGA

SEQ ID NO: 14859 - protein, 17 aa, Artificial Sequence
  Synthetically generated peptide
  VARIANT (1)..(17): Xaa = Any Amino Acid
CCXEWACXNXPAXCTGA

SEQ ID NO: 14860 - protein, 17 aa, Artificial Sequence
  Synthetically generated peptide
  VARIANT (1)..(17): Xaa = Any Amino Acid
CCXEWACXNXPACXTGA

SEQ ID NO: 14861 - protein, 17 aa, Artificial Sequence
  Synthetically generated peptide
  VARIANT (1)..(17): Xaa = Any Amino Acid
CCXEWACXNXPACTXGA

SEQ ID NO: 14862 - protein, 17 aa, Artificial Sequence
  Synthetically generated peptide
  VARIANT (1)..(17): Xaa = Any Amino Acid
CCXEWACXNXPACTGXA

SEQ ID NO: 14863 - protein, 16 aa, Artificial Sequence
  Synthetically generated peptide
  VARIANT (1)..(16): Xaa = Any Amino Acid
CCXEWACXNPXACTGA

SEQ ID NO: 14864 - protein, 17 aa, Artificial Sequence
  Synthetically generated peptide
  VARIANT (1)..(17): Xaa = Any Amino Acid
CCXEWACXNPXXACTGA

SEQ ID NO: 14865 - protein, 17 aa, Artificial Sequence
  Synthetically generated peptide
  VARIANT (1)..(17): Xaa = Any Amino Acid
CCXEWACXNPXAXCTGA

SEQ ID NO: 14866 - protein, 17 aa, Artificial Sequence
  Synthetically generated peptide
  VARIANT (1)..(17): Xaa = Any Amino Acid
CCXEWACXNPXACXTGA

SEQ ID NO: 14867 - protein, 17 aa, Artificial Sequence
  Synthetically generated peptide
  VARIANT (1)..(17): Xaa = Any Amino Acid
CCXEWACXNPXACTXGA

SEQ ID NO: 14868 - protein, 17 aa, Artificial Sequence
  Synthetically generated peptide
  VARIANT (1)..(17): Xaa = Any Amino Acid
CCXEWACXNPXACTGXA

SEQ ID NO: 14869 - protein, 16 aa, Artificial Sequence
  Synthetically generated peptide
  VARIANT (1)..(16): Xaa = Any Amino Acid
CCXEWACXNPAXCTGA

SEQ ID NO: 14870 - protein, 17 aa, Artificial Sequence
  Synthetically generated peptide
  VARIANT (1)..(17): Xaa = Any Amino Acid
CCXEWACXNPAXXCTGA

SEQ ID NO: 14871 - protein, 17 aa, Artificial Sequence
  Synthetically generated peptide
  VARIANT (1)..(17): Xaa = Any Amino Acid
CCXEWACXNPAXCXTGA

SEQ ID NO: 14872 - protein, 17 aa, Artificial Sequence
  Synthetically generated peptide
  VARIANT (1)..(17): Xaa = Any Amino Acid
CCXEWACXNPAXCTXGA

SEQ ID NO: 14873 - protein, 17 aa, Artificial Sequence
  Synthetically generated peptide
  VARIANT (1)..(17): Xaa = Any Amino Acid
CCXEWACXNPAXCTGXA

SEQ ID NO: 14874 - protein, 16 aa, Artificial Sequence
  Synthetically generated peptide
  VARIANT (1)..(16): Xaa = Any Amino Acid
CCXEWACXNPACXTGA

SEQ ID NO: 14875 - protein, 17 aa, Artificial Sequence
  Synthetically generated peptide
  VARIANT (1)..(17): Xaa = Any Amino Acid
CCXEWACXNPACXXTGA

SEQ ID NO: 14876 - protein, 17 aa, Artificial Sequence
  Synthetically generated peptide
  VARIANT (1)..(17): Xaa = Any Amino Acid
CCXEWACXNPACXTXGA

SEQ ID NO: 14877 - protein, 17 aa, Artificial Sequence
  Synthetically generated peptide
  VARIANT (1)..(17): Xaa = Any Amino Acid
CCXEWACXNPACXTGXA

SEQ ID NO: 14878 - protein, 16 aa, Artificial Sequence
  Synthetically generated peptide
  VARIANT (1)..(16): Xaa = Any Amino Acid
CCXEWACXNPACTXGA

SEQ ID NO: 14879 - protein, 17 aa, Artificial Sequence
  Synthetically generated peptide
  VARIANT (1)..(17): Xaa = Any Amino Acid
CCXEWACXNPACTXXGA

SEQ ID NO: 14880 - protein, 17 aa, Artificial Sequence
  Synthetically generated peptide
  VARIANT (1)..(17): Xaa = Any Amino Acid
CCXEWACXNPACTXGXA

SEQ ID NO: 14881 - protein, 16 aa, Artificial Sequence
  Synthetically generated peptide
  VARIANT (1)..(16): Xaa = Any Amino Acid
CCXEWACXNPACTGXA

SEQ ID NO: 14882 - protein, 17 aa, Artificial Sequence
  Synthetically generated peptide
  VARIANT (1)..(17): Xaa = Any Amino Acid
CCXEWACXNPACTGXXA

SEQ ID NO: 14883 - protein, 15 aa, Artificial Sequence
  Synthetically generated peptide
  VARIANT (1)..(15): Xaa = Any Amino Acid
CCXEWACNXPACTGA

SEQ ID NO: 14884 - protein, 16 aa, Artificial Sequence
  Synthetically generated peptide
  VARIANT (1)..(16): Xaa = Any Amino Acid
CCXEWACNXXPACTGA

SEQ ID NO: 14885 - protein, 17 aa, Artificial Sequence
  Synthetically generated peptide
  VARIANT (1)..(17): Xaa = Any Amino Acid
CCXEWACNXXXPACTGA

SEQ ID NO: 14886 - protein, 17 aa, Artificial Sequence
  Synthetically generated peptide
  VARIANT (1)..(17): Xaa = Any Amino Acid
CCXEWACNXXPXACTGA

SEQ ID NO: 14887 - protein, 17 aa, Artificial Sequence
  Synthetically generated peptide
  VARIANT (1)..(17): Xaa = Any Amino Acid
CCXEWACNXXPAXCTGA

SEQ ID NO: 14888 - protein, 17 aa, Artificial Sequence
  Synthetically generated peptide
  VARIANT (1)..(17): Xaa = Any Amino Acid
CCXEWACNXXPACXTGA

SEQ ID NO: 14889 - protein, 17 aa, Artificial Sequence
  Synthetically generated peptide
  VARIANT (1)..(17): Xaa = Any Amino Acid
CCXEWACNXXPACTXGA

SEQ ID NO: 14890 - protein, 17 aa, Artificial Sequence
  Synthetically generated peptide
  VARIANT (1)..(17): Xaa = Any Amino Acid
CCXEWACNXXPACTGXA

SEQ ID NO: 14891 - protein, 16 aa, Artificial Sequence
  Synthetically generated peptide
  VARIANT (1)..(16): Xaa = Any Amino Acid
CCXEWACNXPXACTGA

SEQ ID NO: 14892 - protein, 17 aa, Artificial Sequence
  Synthetically generated peptide
  VARIANT (1)..(17): Xaa = Any Amino Acid
CCXEWACNXPXXACTGA

SEQ ID NO: 14893 - protein, 17 aa, Artificial Sequence
  Synthetically generated peptide
  VARIANT (1)..(17): Xaa = Any Amino Acid
CCXEWACNXPXAXCTGA

SEQ ID NO: 14894 - protein, 17 aa, Artificial Sequence
  Synthetically generated peptide
  VARIANT (1)..(17): Xaa = Any Amino Acid
CCXEWACNXPXACXTGA

SEQ ID NO: 14895 - protein, 17 aa, Artificial Sequence
  Synthetically generated peptide
  VARIANT (1)..(17): Xaa = Any Amino Acid
CCXEWACNXPXACTXGA

SEQ ID NO: 14896 - protein, 17 aa, Artificial Sequence
  Synthetically generated peptide
  VARIANT (1)..(17): Xaa = Any Amino Acid
CCXEWACNXPXACTGXA

SEQ ID NO: 14897 - protein, 16 aa, Artificial Sequence
  Synthetically generated peptide
  VARIANT (1)..(16): Xaa = Any Amino Acid
CCXEWACNXPAXCTGA

SEQ ID NO: 14898 - protein, 17 aa, Artificial Sequence
  Synthetically generated peptide
  VARIANT (1)..(17): Xaa = Any Amino Acid
CCXEWACNXPAXXCTGA

SEQ ID NO: 14899 - protein, 17 aa, Artificial Sequence
  Synthetically generated peptide
  VARIANT (1)..(17): Xaa = Any Amino Acid
CCXEWACNXPAXCXTGA

SEQ ID NO: 14900 - protein, 17 aa, Artificial Sequence
  Synthetically generated peptide
  VARIANT (1)..(17): Xaa = Any Amino Acid
CCXEWACNXPAXCTXGA

SEQ ID NO: 14901 - protein, 17 aa, Artificial Sequence
  Synthetically generated peptide
  VARIANT (1)..(17): Xaa = Any Amino Acid
CCXEWACNXPAXCTGXA

SEQ ID NO: 14902 - protein, 16 aa, Artificial Sequence
  Synthetically generated peptide
  VARIANT (1)..(16): Xaa = Any Amino Acid
CCXEWACNXPACXTGA

SEQ ID NO: 14903 - protein, 17 aa, Artificial Sequence
  Synthetically generated peptide
  VARIANT (1)..(17): Xaa = Any Amino Acid
CCXEWACNXPACXXTGA

SEQ ID NO: 14904 - protein, 17 aa, Artificial Sequence
  Synthetically generated peptide
  VARIANT (1)..(17): Xaa = Any Amino Acid
CCXEWACNXPACXTXGA

SEQ ID NO: 14905 - protein, 17 aa, Artificial Sequence
  Synthetically generated peptide
  VARIANT (1)..(17): Xaa = Any Amino Acid
CCXEWACNXPACXTGXA

SEQ ID NO: 14906 - protein, 16 aa, Artificial Sequence
  Synthetically generated peptide
  VARIANT (1)..(16): Xaa = Any Amino Acid
CCXEWACNXPACTXGA

SEQ ID NO: 14907 - protein, 17 aa, Artificial Sequence
  Synthetically generated peptide
  VARIANT (1)..(17): Xaa = Any Amino Acid
CCXEWACNXPACTXXGA

SEQ ID NO: 14908 - protein, 17 aa, Artificial Sequence
  Synthetically generated peptide
  VARIANT (1)..(17): Xaa = Any Amino Acid
CCXEWACNXPACTXGXA

SEQ ID NO: 14909 - protein, 16 aa, Artificial Sequence
  Synthetically generated peptide
  VARIANT (1)..(16): Xaa = Any Amino Acid
CCXEWACNXPACTGXA

SEQ ID NO: 14910 - protein, 17 aa, Artificial Sequence
  Synthetically generated peptide
  VARIANT (1)..(17): Xaa = Any Amino Acid
CCXEWACNXPACTGXXA

SEQ ID NO: 14911 - protein, 15 aa, Artificial Sequence
  Synthetically generated peptide
  VARIANT (1)..(15): Xaa = Any Amino Acid
CCXEWACNPXACTGA

SEQ ID NO: 14912 - protein, 16 aa, Artificial Sequence
  Synthetically generated peptide
  VARIANT (1)..(16): Xaa = Any Amino Acid
CCXEWACNPXXACTGA

SEQ ID NO: 14913 - protein, 17 aa, Artificial Sequence
  Synthetically generated peptide
  VARIANT (1)..(17): Xaa = Any Amino Acid
CCXEWACNPXXXACTGA

SEQ ID NO: 14914 - protein, 17 aa, Artificial Sequence
  Synthetically generated peptide
  VARIANT (1)..(17): Xaa = Any Amino Acid
CCXEWACNPXXAXCTGA

SEQ ID NO: 14915 - protein, 17 aa, Artificial Sequence
  Synthetically generated peptide
  VARIANT (1)..(17): Xaa = Any Amino Acid
CCXEWACNPXXACXTGA

SEQ ID NO: 14916 - protein, 17 aa, Artificial Sequence
  Synthetically generated peptide
  VARIANT (1)..(17): Xaa = Any Amino Acid
CCXEWACNPXXACTXGA

SEQ ID NO: 14917 - protein, 17 aa, Artificial Sequence
  Synthetically generated peptide
  VARIANT (1)..(17): Xaa = Any Amino Acid
CCXEWACNPXXACTGXA

SEQ ID NO: 14918 - protein, 16 aa, Artificial Sequence
  Synthetically generated peptide
  VARIANT (1)..(16): Xaa = Any Amino Acid
CCXEWACNPXAXCTGA

SEQ ID NO: 14919 - protein, 17 aa, Artificial Sequence
  Synthetically generated peptide
  VARIANT (1)..(17): Xaa = Any Amino Acid
CCXEWACNPXAXXCTGA

SEQ ID NO: 14920 - protein, 17 aa, Artificial Sequence
  Synthetically generated peptide
  VARIANT (1)..(17): Xaa = Any Amino Acid
CCXEWACNPXAXCXTGA

SEQ ID NO: 14921 - protein, 17 aa, Artificial Sequence
  Synthetically generated peptide
  VARIANT (1)..(17): Xaa = Any Amino Acid
CCXEWACNPXAXCTXGA

SEQ ID NO: 14922 - protein, 17 aa, Artificial Sequence
  Synthetically generated peptide
  VARIANT (1)..(17): Xaa = Any Amino Acid
CCXEWACNPXAXCTGXA

SEQ ID NO: 14923 - protein, 16 aa, Artificial Sequence
  Synthetically generated peptide
  VARIANT (1)..(16): Xaa = Any Amino Acid
CCXEWACNPXACXTGA

SEQ ID NO: 14924 - protein, 17 aa, Artificial Sequence
  Synthetically generated peptide
  VARIANT (1)..(17): Xaa = Any Amino Acid
CCXEWACNPXACXXTGA

SEQ ID NO: 14925 - protein, 17 aa, Artificial Sequence
  Synthetically generated peptide
  VARIANT (1)..(17): Xaa = Any Amino Acid
CCXEWACNPXACXTXGA

SEQ ID NO: 14926 - protein, 17 aa, Artificial Sequence
  Synthetically generated peptide
  VARIANT (1)..(17): Xaa = Any Amino Acid
CCXEWACNPXACXTGXA

SEQ ID NO: 14927 - protein, 16 aa, Artificial Sequence
  Synthetically generated peptide
  VARIANT (1)..(16): Xaa = Any Amino Acid
CCXEWACNPXACTXGA

SEQ ID NO: 14928 - protein, 17 aa, Artificial Sequence
  Synthetically generated peptide
  VARIANT (1)..(17): Xaa = Any Amino Acid
CCXEWACNPXACTXXGA

SEQ ID NO: 14929 - protein, 17 aa, Artificial Sequence
  Synthetically generated peptide
  VARIANT (1)..(17): Xaa = Any Amino Acid
CCXEWACNPXACTXGXA

SEQ ID NO: 14930 - protein, 16 aa, Artificial Sequence
  Synthetically generated peptide
  VARIANT (1)..(16): Xaa = Any Amino Acid
CCXEWACNPXACTGXA

SEQ ID NO: 14931 - protein, 17 aa, Artificial Sequence
  Synthetically generated peptide
  VARIANT (1)..(17): Xaa = Any Amino Acid
CCXEWACNPXACTGXXA

SEQ ID NO: 14932 - protein, 15 aa, Artificial Sequence
  Synthetically generated peptide
  VARIANT (1)..(15): Xaa = Any Amino Acid
CCXEWACNPAXCTGA

SEQ ID NO: 14933 - protein, 16 aa, Artificial Sequence
  Synthetically generated peptide
  VARIANT (1)..(16): Xaa = Any Amino Acid
CCXEWACNPAXXCTGA

SEQ ID NO: 14934 - protein, 17 aa, Artificial Sequence
  Synthetically generated peptide
  VARIANT (1)..(17): Xaa = Any Amino Acid
CCXEWACNPAXXXCTGA

SEQ ID NO: 14935 - protein, 17 aa, Artificial Sequence
  Synthetically generated peptide
  VARIANT (1)..(17): Xaa = Any Amino Acid
CCXEWACNPAXXCXTGA

SEQ ID NO: 14936 - protein, 17 aa, Artificial Sequence
  Synthetically generated peptide
  VARIANT (1)..(17): Xaa = Any Amino Acid
CCXEWACNPAXXCTXGA

SEQ ID NO: 14937 - protein, 17 aa, Artificial Sequence
  Synthetically generated peptide
  VARIANT (1)..(17): Xaa = Any Amino Acid
CCXEWACNPAXXCTGXA

SEQ ID NO: 14938 - protein, 16 aa, Artificial Sequence
  Synthetically generated peptide
  VARIANT (1)..(16): Xaa = Any Amino Acid
CCXEWACNPAXCXTGA

SEQ ID NO: 14939 - protein, 17 aa, Artificial Sequence
  Synthetically generated peptide
  VARIANT (1)..(17): Xaa = Any Amino Acid
CCXEWACNPAXCXXTGA

SEQ ID NO: 14940 - protein, 17 aa, Artificial Sequence
  Synthetically generated peptide
  VARIANT (1)..(17): Xaa = Any Amino Acid
CCXEWACNPAXCXTXGA

SEQ ID NO: 14941 - protein, 17 aa, Artificial Sequence
  Synthetically generated peptide
  VARIANT (1)..(17): Xaa = Any Amino Acid
CCXEWACNPAXCXTGXA

SEQ ID NO: 14942 - protein, 16 aa, Artificial Sequence
  Synthetically generated peptide
  VARIANT (1)..(16): Xaa = Any Amino Acid
CCXEWACNPAXCTXGA

SEQ ID NO: 14943 - protein, 17 aa, Artificial Sequence
  Synthetically generated peptide
  VARIANT (1)..(17): Xaa = Any Amino Acid
CCXEWACNPAXCTXXGA

SEQ ID NO: 14944 - protein, 17 aa, Artificial Sequence
  Synthetically generated peptide
  VARIANT (1)..(17): Xaa = Any Amino Acid
CCXEWACNPAXCTXGXA

SEQ ID NO: 14945 - protein, 16 aa, Artificial Sequence
  Synthetically generated peptide
  VARIANT (1)..(16): Xaa = Any Amino Acid
CCXEWACNPAXCTGXA

SEQ ID NO: 14946 - protein, 17 aa, Artificial Sequence
  Synthetically generated peptide
  VARIANT (1)..(17): Xaa = Any Amino Acid
CCXEWACNPAXCTGXXA

SEQ ID NO: 14947 - protein, 15 aa, Artificial Sequence
  Synthetically generated peptide
  VARIANT (1)..(15): Xaa = Any Amino Acid
CCXEWACNPACXTGA

SEQ ID NO: 14948 - protein, 16 aa, Artificial Sequence
  Synthetically generated peptide
  VARIANT (1)..(16): Xaa = Any Amino Acid
CCXEWACNPACXXTGA

SEQ ID NO: 14949 - protein, 17 aa, Artificial Sequence
  Synthetically generated peptide
  VARIANT (1)..(17): Xaa = Any Amino Acid
CCXEWACNPACXXXTGA

SEQ ID NO: 14950 - protein, 17 aa, Artificial Sequence
  Synthetically generated peptide
  VARIANT (1)..(17): Xaa = Any Amino Acid
CCXEWACNPACXXTXGA

SEQ ID NO: 14951 - protein, 17 aa, Artificial Sequence
  Synthetically generated peptide
  VARIANT (1)..(17): Xaa = Any Amino Acid
CCXEWACNPACXXTGXA

SEQ ID NO: 14952 - protein, 16 aa, Artificial Sequence
  Synthetically generated peptide
  VARIANT (1)..(16): Xaa = Any Amino Acid
CCXEWACNPACXTXGA

SEQ ID NO: 14953 - protein, 17 aa, Artificial Sequence
  Synthetically generated peptide
  VARIANT (1)..(17): Xaa = Any Amino Acid
CCXEWACNPACXTXXGA

SEQ ID NO: 14954 - protein, 17 aa, Artificial Sequence
  Synthetically generated peptide
  VARIANT (1)..(17): Xaa = Any Amino Acid
CCXEWACNPACXTXGXA

SEQ ID NO: 14955 - protein, 16 aa, Artificial Sequence
  Synthetically generated peptide
  VARIANT (1)..(16): Xaa = Any Amino Acid
CCXEWACNPACXTGXA

SEQ ID NO: 14956 - protein, 17 aa, Artificial Sequence
  Synthetically generated peptide
  VARIANT (1)..(17): Xaa = Any Amino Acid
CCXEWACNPACXTGXXA

SEQ ID NO: 14957 - protein, 15 aa, Artificial Sequence
  Synthetically generated peptide
  VARIANT (1)..(15): Xaa = Any Amino Acid
CCXEWACNPACTXGA

SEQ ID NO: 14958 - protein, 16 aa, Artificial Sequence
  Synthetically generated peptide
  VARIANT (1)..(16): Xaa = Any Amino Acid
CCXEWACNPACTXXGA

SEQ ID NO: 14959 - protein, 17 aa, Artificial Sequence
  Synthetically generated peptide
  VARIANT (1)..(17): Xaa = Any Amino Acid
CCXEWACNPACTXXXGA

SEQ ID NO: 14960 - protein, 17 aa, Artificial Sequence
  Synthetically generated peptide
  VARIANT (1)..(17): Xaa = Any Amino Acid
CCXEWACNPACTXXGXA

SEQ ID NO: 14961 - protein, 16 aa, Artificial Sequence
  Synthetically generated peptide
  VARIANT (1)..(16): Xaa = Any Amino Acid
CCXEWACNPACTXGXA

SEQ ID NO: 14962 - protein, 17 aa, Artificial Sequence
  Synthetically generated peptide
  VARIANT (1)..(17): Xaa = Any Amino Acid
CCXEWACNPACTXGXXA

SEQ ID NO: 14963 - protein, 15 aa, Artificial Sequence
  Synthetically generated peptide
  VARIANT (1)..(15): Xaa = Any Amino Acid
CCXEWACNPACTGXA

SEQ ID NO: 14964 - protein, 16 aa, Artificial Sequence
  Synthetically generated peptide
  VARIANT (1)..(16): Xaa = Any Amino Acid
CCXEWACNPACTGXXA

SEQ ID NO: 14965 - protein, 17 aa, Artificial Sequence
  Synthetically generated peptide
  VARIANT (1)..(17): Xaa = Any Amino Acid
CCXEWACNPACTGXXXA

SEQ ID NO: 14966 - protein, 14 aa, Artificial Sequence
  Synthetically generated peptide
  VARIANT (1)..(14): Xaa = Any Amino Acid
CCEXWACNPACTGA

SEQ ID NO: 14967 - protein, 15 aa, Artificial Sequence
  Synthetically generated peptide
  VARIANT (1)..(15): Xaa = Any Amino Acid
CCEXXWACNPACTGA

SEQ ID NO: 14968 - protein, 16 aa, Artificial Sequence
  Synthetically generated peptide
  VARIANT (1)..(16): Xaa = Any Amino Acid
CCEXXXWACNPACTGA

SEQ ID NO: 14969 - protein, 17 aa, Artificial Sequence
  Synthetically generated peptide
  VARIANT (1)..(17): Xaa = Any Amino Acid
CCEXXXXWACNPACTGA

SEQ ID NO: 14970 - protein, 17 aa, Artificial Sequence
  Synthetically generated peptide
  VARIANT (1)..(17): Xaa = Any Amino Acid
CCEXXXWXACNPACTGA

SEQ ID NO: 14971 - protein, 17 aa, Artificial Sequence
  Synthetically generated peptide
  VARIANT (1)..(17): Xaa = Any Amino Acid
CCEXXXWACXNPACTGA

SEQ ID NO: 14972 - protein, 17 aa, Artificial Sequence
  Synthetically generated peptide
  VARIANT (1)..(17): Xaa = Any Amino Acid
CCEXXXWACNXPACTGA

SEQ ID NO: 14973 - protein, 17 aa, Artificial Sequence
  Synthetically generated peptide
  VARIANT (1)..(17): Xaa = Any Amino Acid
CCEXXXWACNPXACTGA

SEQ ID NO: 14974 - protein, 17 aa, Artificial Sequence
  Synthetically generated peptide
  VARIANT (1)..(17): Xaa = Any Amino Acid
CCEXXXWACNPAXCTGA

SEQ ID NO: 14975 - protein, 17 aa, Artificial Sequence
  Synthetically generated peptide
  VARIANT (1)..(17): Xaa = Any Amino Acid
CCEXXXWACNPACXTGA

SEQ ID NO: 14976 - protein, 17 aa, Artificial Sequence
  Synthetically generated peptide
  VARIANT (1)..(17): Xaa = Any Amino Acid
CCEXXXWACNPACTXGA

SEQ ID NO: 14977 - protein, 17 aa, Artificial Sequence
  Synthetically generated peptide
  VARIANT (1)..(17): Xaa = Any Amino Acid
CCEXXXWACNPACTGXA

SEQ ID NO: 14978 - protein, 16 aa, Artificial Sequence
  Synthetically generated peptide
  VARIANT (1)..(16): Xaa = Any Amino Acid
CCEXXWXACNPACTGA

SEQ ID NO: 14979 - protein, 17 aa, Artificial Sequence
  Synthetically generated peptide
  VARIANT (1)..(17): Xaa = Any Amino Acid
CCEXXWXXACNPACTGA

SEQ ID NO: 14980 - protein, 17 aa, Artificial Sequence
  Synthetically generated peptide
  VARIANT (1)..(17): Xaa = Any Amino Acid
CCEXXWXACXNPACTGA

SEQ ID NO: 14981 - protein, 17 aa, Artificial Sequence
  Synthetically generated peptide
  VARIANT (1)..(17): Xaa = Any Amino Acid
CCEXXWXACNXPACTGA

SEQ ID NO: 14982 - protein, 17 aa, Artificial Sequence
  Synthetically generated peptide
  VARIANT (1)..(17): Xaa = Any Amino Acid
CCEXXWXACNPXACTGA

SEQ ID NO: 14983 - protein, 17 aa, Artificial Sequence
  Synthetically generated peptide
  VARIANT (1)..(17): Xaa = Any Amino Acid
CCEXXWXACNPAXCTGA

SEQ ID NO: 14984 - protein, 17 aa, Artificial Sequence
  Synthetically generated peptide
  VARIANT (1)..(17): Xaa = Any Amino Acid
CCEXXWXACNPACXTGA

SEQ ID NO: 14985 - protein, 17 aa, Artificial Sequence
  Synthetically generated peptide
  VARIANT (1)..(17): Xaa = Any Amino Acid
CCEXXWXACNPACTXGA

SEQ ID NO: 14986 - protein, 17 aa, Artificial Sequence
  Synthetically generated peptide
  VARIANT (1)..(17): Xaa = Any Amino Acid
CCEXXWXACNPACTGXA

SEQ ID NO: 14987 - protein, 16 aa, Artificial Sequence
  Synthetically generated peptide
  VARIANT (1)..(16): Xaa = Any Amino Acid
CCEXXWACXNPACTGA

SEQ ID NO: 14988 - protein, 17 aa, Artificial Sequence
  Synthetically generated peptide
  VARIANT (1)..(17): Xaa = Any Amino Acid
CCEXXWACXXNPACTGA

SEQ ID NO: 14989 - protein, 17 aa, Artificial Sequence
  Synthetically generated peptide
  VARIANT (1)..(17): Xaa = Any Amino Acid
CCEXXWACXNXPACTGA

SEQ ID NO: 14990 - protein, 17 aa, Artificial Sequence
  Synthetically generated peptide
  VARIANT (1)..(17): Xaa = Any Amino Acid
CCEXXWACXNPXACTGA

SEQ ID NO: 14991 - protein, 17 aa, Artificial Sequence
  Synthetically generated peptide
  VARIANT (1)..(17): Xaa = Any Amino Acid
CCEXXWACXNPAXCTGA

SEQ ID NO: 14992 - protein, 17 aa, Artificial Sequence
  Synthetically generated peptide
  VARIANT (1)..(17): Xaa = Any Amino Acid
CCEXXWACXNPACXTGA

SEQ ID NO: 14993 - protein, 17 aa, Artificial Sequence
  Synthetically generated peptide
  VARIANT (1)..(17): Xaa = Any Amino Acid
CCEXXWACXNPACTXGA

SEQ ID NO: 14994 - protein, 17 aa, Artificial Sequence
  Synthetically generated peptide
  VARIANT (1)..(17): Xaa = Any Amino Acid
CCEXXWACXNPACTGXA

SEQ ID NO: 14995 - protein, 16 aa, Artificial Sequence
  Synthetically generated peptide
  VARIANT (1)..(16): Xaa = Any Amino Acid
CCEXXWACNXPACTGA

SEQ ID NO: 14996 - protein, 17 aa, Artificial Sequence
  Synthetically generated peptide
  VARIANT (1)..(17): Xaa = Any Amino Acid
CCEXXWACNXXPACTGA

SEQ ID NO: 14997 - protein, 17 aa, Artificial Sequence
  Synthetically generated peptide
  VARIANT (1)..(17): Xaa = Any Amino Acid
CCEXXWACNXPXACTGA

SEQ ID NO: 14998 - protein, 17 aa, Artificial Sequence
  Synthetically generated peptide
  VARIANT (1)..(17): Xaa = Any Amino Acid
CCEXXWACNXPAXCTGA

SEQ ID NO: 14999 - protein, 17 aa, Artificial Sequence
  Synthetically generated peptide
  VARIANT (1)..(17): Xaa = Any Amino Acid
CCEXXWACNXPACXTGA

SEQ ID NO: 15000 - protein, 17 aa, Artificial Sequence
  Synthetically generated peptide
  VARIANT (1)..(17): Xaa = Any Amino Acid
CCEXXWACNXPACTXGA

SEQ ID NO: 15001 - protein, 17 aa, Artificial Sequence
  Synthetically generated peptide
  VARIANT (1)..(17): Xaa = Any Amino Acid
CCEXXWACNXPACTGXA

SEQ ID NO: 15002 - protein, 16 aa, Artificial Sequence
  Synthetically generated peptide
  VARIANT (1)..(16): Xaa = Any Amino Acid
CCEXXWACNPXACTGA

SEQ ID NO: 15003 - protein, 17 aa, Artificial Sequence
  Synthetically generated peptide
  VARIANT (1)..(17): Xaa = Any Amino Acid
CCEXXWACNPXXACTGA

SEQ ID NO: 15004 - protein, 17 aa, Artificial Sequence
  Synthetically generated peptide
  VARIANT (1)..(17): Xaa = Any Amino Acid
CCEXXWACNPXAXCTGA

SEQ ID NO: 15005 - protein, 17 aa, Artificial Sequence
  Synthetically generated peptide
  VARIANT (1)..(17): Xaa = Any Amino Acid
CCEXXWACNPXACXTGA

SEQ ID NO: 15006 - protein, 17 aa, Artificial Sequence
  Synthetically generated peptide
  VARIANT (1)..(17): Xaa = Any Amino Acid
CCEXXWACNPXACTXGA

SEQ ID NO: 15007 - protein, 17 aa, Artificial Sequence
  Synthetically generated peptide
  VARIANT (1)..(17): Xaa = Any Amino Acid
CCEXXWACNPXACTGXA

SEQ ID NO: 15008 - protein, 16 aa, Artificial Sequence
  Synthetically generated peptide
  VARIANT (1)..(16): Xaa = Any Amino Acid
CCEXXWACNPAXCTGA

SEQ ID NO: 15009 - protein, 17 aa, Artificial Sequence
  Synthetically generated peptide
  VARIANT (1)..(17): Xaa = Any Amino Acid
CCEXXWACNPAXXCTGA

SEQ ID NO: 15010 - protein, 17 aa, Artificial Sequence
  Synthetically generated peptide
  VARIANT (1)..(17): Xaa = Any Amino Acid
CCEXXWACNPAXCXTGA

SEQ ID NO: 15011 - protein, 17 aa, Artificial Sequence
  Synthetically generated peptide
  VARIANT (1)..(17): Xaa = Any Amino Acid
CCEXXWACNPAXCTXGA

SEQ ID NO: 15012 - protein, 17 aa, Artificial Sequence
  Synthetically generated peptide
  VARIANT (1)..(17): Xaa = Any Amino Acid
CCEXXWACNPAXCTGXA

SEQ ID NO: 15013 - protein, 16 aa, Artificial Sequence
  Synthetically generated peptide
  VARIANT (1)..(16): Xaa = Any Amino Acid
CCEXXWACNPACXTGA

SEQ ID NO: 15014 - protein, 17 aa, Artificial Sequence
  Synthetically generated peptide
  VARIANT (1)..(17): Xaa = Any Amino Acid
CCEXXWACNPACXXTGA

SEQ ID NO: 15015 - protein, 17 aa, Artificial Sequence
  Synthetically generated peptide
  VARIANT (1)..(17): Xaa = Any Amino Acid
CCEXXWACNPACXTXGA

SEQ ID NO: 15016 - protein, 17 aa, Artificial Sequence
  Synthetically generated peptide
  VARIANT (1)..(17): Xaa = Any Amino Acid
CCEXXWACNPACXTGXA

SEQ ID NO: 15017 - protein, 16 aa, Artificial Sequence
  Synthetically generated peptide
  VARIANT (1)..(16): Xaa = Any Amino Acid
CCEXXWACNPACTXGA

SEQ ID NO: 15018 - protein, 17 aa, Artificial Sequence
  Synthetically generated peptide
  VARIANT (1)..(17): Xaa = Any Amino Acid
CCEXXWACNPACTXXGA

SEQ ID NO: 15019 - protein, 17 aa, Artificial Sequence
  Synthetically generated peptide
  VARIANT (1)..(17): Xaa = Any Amino Acid
CCEXXWACNPACTXGXA

SEQ ID NO: 15020 - protein, 16 aa, Artificial Sequence
  Synthetically generated peptide
  VARIANT (1)..(16): Xaa = Any Amino Acid
CCEXXWACNPACTGXA

SEQ ID NO: 15021 - protein, 17 aa, Artificial Sequence
  Synthetically generated peptide
  VARIANT (1)..(17): Xaa = Any Amino Acid
CCEXXWACNPACTGXXA

SEQ ID NO: 15022 - protein, 15 aa, Artificial Sequence
  Synthetically generated peptide
  VARIANT (1)..(15): Xaa = Any Amino Acid
CCEXWXACNPACTGA

SEQ ID NO: 15023 - protein, 16 aa, Artificial Sequence
  Synthetically generated peptide
  VARIANT (1)..(16): Xaa = Any Amino Acid
CCEXWXXACNPACTGA

SEQ ID NO: 15024 - protein, 17 aa, Artificial Sequence
  Synthetically generated peptide
  VARIANT (1)..(17): Xaa = Any Amino Acid
CCEXWXXXACNPACTGA

SEQ ID NO: 15025 - protein, 17 aa, Artificial Sequence
  Synthetically generated peptide
  VARIANT (1)..(17): Xaa = Any Amino Acid
CCEXWXXACXNPACTGA

SEQ ID NO: 15026 - protein, 17 aa, Artificial Sequence
  Synthetically generated peptide
  VARIANT (1)..(17): Xaa = Any Amino Acid
CCEXWXXACNXPACTGA

SEQ ID NO: 15027 - protein, 17 aa, Artificial Sequence
  Synthetically generated peptide
  VARIANT (1)..(17): Xaa = Any Amino Acid
CCEXWXXACNPXACTGA

SEQ ID NO: 15028 - protein, 17 aa, Artificial Sequence
  Synthetically generated peptide
  VARIANT (1)..(17): Xaa = Any Amino Acid
CCEXWXXACNPAXCTGA

SEQ ID NO: 15029 - protein, 17 aa, Artificial Sequence
  Synthetically generated peptide
  VARIANT (1)..(17): Xaa = Any Amino Acid
CCEXWXXACNPACXTGA

SEQ ID NO: 15030 - protein, 17 aa, Artificial Sequence
  Synthetically generated peptide
  VARIANT (1)..(17): Xaa = Any Amino Acid
CCEXWXXACNPACTXGA

SEQ ID NO: 15031 - protein, 17 aa, Artificial Sequence
  Synthetically generated peptide
  VARIANT (1)..(17): Xaa = Any Amino Acid
CCEXWXXACNPACTGXA

SEQ ID NO: 15032 - protein, 16 aa, Artificial Sequence
  Synthetically generated peptide
  VARIANT (1)..(16): Xaa = Any Amino Acid
CCEXWXACXNPACTGA

SEQ ID NO: 15033 - protein, 17 aa, Artificial Sequence
  Synthetically generated peptide
  VARIANT (1)..(17): Xaa = Any Amino Acid
CCEXWXACXXNPACTGA

SEQ ID NO: 15034 - protein, 17 aa, Artificial Sequence
  Synthetically generated peptide
  VARIANT (1)..(17): Xaa = Any Amino Acid
CCEXWXACXNXPACTGA

SEQ ID NO: 15035 - protein, 17 aa, Artificial Sequence
  Synthetically generated peptide
  VARIANT (1)..(17): Xaa = Any Amino Acid
CCEXWXACXNPXACTGA

SEQ ID NO: 15036 - protein, 17 aa, Artificial Sequence
  Synthetically generated peptide
  VARIANT (1)..(17): Xaa = Any Amino Acid
CCEXWXACXNPAXCTGA

SEQ ID NO: 15037 - protein, 17 aa, Artificial Sequence
  Synthetically generated peptide
  VARIANT (1)..(17): Xaa = Any Amino Acid
CCEXWXACXNPACXTGA

SEQ ID NO: 15038 - protein, 17 aa, Artificial Sequence
  Synthetically generated peptide
  VARIANT (1)..(17): Xaa = Any Amino Acid
CCEXWXACXNPACTXGA

SEQ ID NO: 15039 - protein, 17 aa, Artificial Sequence
  Synthetically generated peptide
  VARIANT (1)..(17): Xaa = Any Amino Acid
CCEXWXACXNPACTGXA

SEQ ID NO: 15040 - protein, 16 aa, Artificial Sequence
  Synthetically generated peptide
  VARIANT (1)..(16): Xaa = Any Amino Acid
CCEXWXACNXPACTGA

SEQ ID NO: 15041 - protein, 17 aa, Artificial Sequence
  Synthetically generated peptide
  VARIANT (1)..(17): Xaa = Any Amino Acid
CCEXWXACNXXPACTGA

SEQ ID NO: 15042 - protein, 17 aa, Artificial Sequence
  Synthetically generated peptide
  VARIANT (1)..(17): Xaa = Any Amino Acid
CCEXWXACNXPXACTGA

SEQ ID NO: 15043 - protein, 17 aa, Artificial Sequence
  Synthetically generated peptide
  VARIANT (1)..(17): Xaa = Any Amino Acid
CCEXWXACNXPAXCTGA

SEQ ID NO: 15044 - protein, 17 aa, Artificial Sequence
  Synthetically generated peptide
  VARIANT (1)..(17): Xaa = Any Amino Acid
CCEXWXACNXPACXTGA

SEQ ID NO: 15045 - protein, 17 aa, Artificial Sequence
  Synthetically generated peptide
  VARIANT (1)..(17): Xaa = Any Amino Acid
CCEXWXACNXPACTXGA

SEQ ID NO: 15046 - protein, 17 aa, Artificial Sequence
  Synthetically generated peptide
  VARIANT (1)..(17): Xaa = Any Amino Acid
CCEXWXACNXPACTGXA

SEQ ID NO: 15047 - protein, 16 aa, Artificial Sequence
  Synthetically generated peptide
  VARIANT (1)..(16): Xaa = Any Amino Acid
CCEXWXACNPXACTGA

SEQ ID NO: 15048 - protein, 17 aa, Artificial Sequence
  Synthetically generated peptide
  VARIANT (1)..(17): Xaa = Any Amino Acid
CCEXWXACNPXXACTGA

SEQ ID NO: 15049 - protein, 17 aa, Artificial Sequence
  Synthetically generated peptide
  VARIANT (1)..(17): Xaa = Any Amino Acid
CCEXWXACNPXAXCTGA

SEQ ID NO: 15050 - protein, 17 aa, Artificial Sequence
  Synthetically generated peptide
  VARIANT (1)..(17): Xaa = Any Amino Acid
CCEXWXACNPXACXTGA

SEQ ID NO: 15051 - protein, 17 aa, Artificial Sequence
  Synthetically generated peptide
  VARIANT (1)..(17): Xaa = Any Amino Acid
CCEXWXACNPXACTXGA

SEQ ID NO: 15052 - protein, 17 aa, Artificial Sequence
  Synthetically generated peptide
  VARIANT (1)..(17): Xaa = Any Amino Acid
CCEXWXACNPXACTGXA

SEQ ID NO: 15053 - protein, 16 aa, Artificial Sequence
  Synthetically generated peptide
  VARIANT (1)..(16): Xaa = Any Amino Acid
CCEXWXACNPAXCTGA

SEQ ID NO: 15054 - protein, 17 aa, Artificial Sequence
  Synthetically generated peptide
  VARIANT (1)..(17): Xaa = Any Amino Acid
CCEXWXACNPAXXCTGA

SEQ ID NO: 15055 - protein, 17 aa, Artificial Sequence
  Synthetically generated peptide
  VARIANT (1)..(17): Xaa = Any Amino Acid
CCEXWXACNPAXCXTGA

SEQ ID NO: 15056 - protein, 17 aa, Artificial Sequence
  Synthetically generated peptide
  VARIANT (1)..(17): Xaa = Any Amino Acid
CCEXWXACNPAXCTXGA

SEQ ID NO: 15057 - protein, 17 aa, Artificial Sequence
  Synthetically generated peptide
  VARIANT (1)..(17): Xaa = Any Amino Acid
CCEXWXACNPAXCTGXA

SEQ ID NO: 15058 - protein, 16 aa, Artificial Sequence
  Synthetically generated peptide
  VARIANT (1)..(16): Xaa = Any Amino Acid
CCEXWXACNPACXTGA

SEQ ID NO: 15059 - protein, 17 aa, Artificial Sequence
  Synthetically generated peptide
  VARIANT (1)..(17): Xaa = Any Amino Acid
CCEXWXACNPACXXTGA

SEQ ID NO: 15060 - protein, 17 aa, Artificial Sequence
  Synthetically generated peptide
  VARIANT (1)..(17): Xaa = Any Amino Acid
CCEXWXACNPACXTXGA

SEQ ID NO: 15061 - protein, 17 aa, Artificial Sequence
  Synthetically generated peptide
  VARIANT (1)..(17): Xaa = Any Amino Acid
CCEXWXACNPACXTGXA

SEQ ID NO: 15062 - protein, 16 aa, Artificial Sequence
  Synthetically generated peptide
  VARIANT (1)..(16): Xaa = Any Amino Acid
CCEXWXACNPACTXGA

SEQ ID NO: 15063 - protein, 17 aa, Artificial Sequence
  Synthetically generated peptide
  VARIANT (1)..(17): Xaa = Any Amino Acid
CCEXWXACNPACTXXGA

SEQ ID NO: 15064 - protein, 17 aa, Artificial Sequence
  Synthetically generated peptide
  VARIANT (1)..(17): Xaa = Any Amino Acid
CCEXWXACNPACTXGXA

SEQ ID NO: 15065 - protein, 16 aa, Artificial Sequence
  Synthetically generated peptide
  VARIANT (1)..(16): Xaa = Any Amino Acid
CCEXWXACNPACTGXA

SEQ ID NO: 15066 - protein, 17 aa, Artificial Sequence
  Synthetically generated peptide
  VARIANT (1)..(17): Xaa = Any Amino Acid
CCEXWXACNPACTGXXA

SEQ ID NO: 15067 - protein, 15 aa, Artificial Sequence
  Synthetically generated peptide
  VARIANT (1)..(15): Xaa = Any Amino Acid
CCEXWACXNPACTGA

SEQ ID NO: 15068 - protein, 16 aa, Artificial Sequence
  Synthetically generated peptide
  VARIANT (1)..(16): Xaa = Any Amino Acid
CCEXWACXXNPACTGA

SEQ ID NO: 15069 - protein, 17 aa, Artificial Sequence
  Synthetically generated peptide
  VARIANT (1)..(17): Xaa = Any Amino Acid
CCEXWACXXXNPACTGA

SEQ ID NO: 15070 - protein, 17 aa, Artificial Sequence
  Synthetically generated peptide
  VARIANT (1)..(17): Xaa = Any Amino Acid
CCEXWACXXNXPACTGA

SEQ ID NO: 15071 - protein, 17 aa, Artificial Sequence
  Synthetically generated peptide
  VARIANT (1)..(17): Xaa = Any Amino Acid
CCEXWACXXNPXACTGA

SEQ ID NO: 15072 - protein, 17 aa, Artificial Sequence
  Synthetically generated peptide
  VARIANT (1)..(17): Xaa = Any Amino Acid
CCEXWACXXNPAXCTGA

SEQ ID NO: 15073 - protein, 17 aa, Artificial Sequence
  Synthetically generated peptide
  VARIANT (1)..(17): Xaa = Any Amino Acid
CCEXWACXXNPACXTGA

SEQ ID NO: 15074 - protein, 17 aa, Artificial Sequence
  Synthetically generated peptide
  VARIANT (1)..(17): Xaa = Any Amino Acid
CCEXWACXXNPACTXGA

SEQ ID NO: 15075 - protein, 17 aa, Artificial Sequence
  Synthetically generated peptide
  VARIANT (1)..(17): Xaa = Any Amino Acid
CCEXWACXXNPACTGXA

SEQ ID NO: 15076 - protein, 16 aa, Artificial Sequence
  Synthetically generated peptide
  VARIANT (1)..(16): Xaa = Any Amino Acid
CCEXWACXNXPACTGA

SEQ ID NO: 15077 - protein, 17 aa, Artificial Sequence
  Synthetically generated peptide
  VARIANT (1)..(17): Xaa = Any Amino Acid
CCEXWACXNXXPACTGA

SEQ ID NO: 15078 - protein, 17 aa, Artificial Sequence
  Synthetically generated peptide
  VARIANT (1)..(17): Xaa = Any Amino Acid
CCEXWACXNXPXACTGA

SEQ ID NO: 15079 - protein, 17 aa, Artificial Sequence
  Synthetically generated peptide
  VARIANT (1)..(17): Xaa = Any Amino Acid
CCEXWACXNXPAXCTGA

SEQ ID NO: 15080 - protein, 17 aa, Artificial Sequence
  Synthetically generated peptide
  VARIANT (1)..(17): Xaa = Any Amino Acid
CCEXWACXNXPACXTGA

SEQ ID NO: 15081 - protein, 17 aa, Artificial Sequence
  Synthetically generated peptide
  VARIANT (1)..(17): Xaa = Any Amino Acid
CCEXWACXNXPACTXGA

SEQ ID NO: 15082 - protein, 17 aa, Artificial Sequence
  Synthetically generated peptide
  VARIANT (1)..(17): Xaa = Any Amino Acid
CCEXWACXNXPACTGXA

SEQ ID NO: 15083 - protein, 16 aa, Artificial Sequence
  Synthetically generated peptide
  VARIANT (1)..(16): Xaa = Any Amino Acid
CCEXWACXNPXACTGA

SEQ ID NO: 15084 - protein, 17 aa, Artificial Sequence
  Synthetically generated peptide
  VARIANT (1)..(17): Xaa = Any Amino Acid
CCEXWACXNPXXACTGA

SEQ ID NO: 15085 - protein, 17 aa, Artificial Sequence
  Synthetically generated peptide
  VARIANT (1)..(17): Xaa = Any Amino Acid
CCEXWACXNPXAXCTGA

SEQ ID NO: 15086 - protein, 17 aa, Artificial Sequence
  Synthetically generated peptide
  VARIANT (1)..(17): Xaa = Any Amino Acid
CCEXWACXNPXACXTGA

SEQ ID NO: 15087 - protein, 17 aa, Artificial Sequence
  Synthetically generated peptide
  VARIANT (1)..(17): Xaa = Any Amino Acid
CCEXWACXNPXACTXGA

SEQ ID NO: 15088 - protein, 17 aa, Artificial Sequence
  Synthetically generated peptide
  VARIANT (1)..(17): Xaa = Any Amino Acid
CCEXWACXNPXACTGXA

SEQ ID NO: 15089 - protein, 16 aa, Artificial Sequence
  Synthetically generated peptide
  VARIANT (1)..(16): Xaa = Any Amino Acid
CCEXWACXNPAXCTGA

SEQ ID NO: 15090 - protein, 17 aa, Artificial Sequence
  Synthetically generated peptide
  VARIANT (1)..(17): Xaa = Any Amino Acid
CCEXWACXNPAXXCTGA

SEQ ID NO: 15091 - protein, 17 aa, Artificial Sequence
  Synthetically generated peptide
  VARIANT (1)..(17): Xaa = Any Amino Acid
CCEXWACXNPAXCXTGA

SEQ ID NO: 15092 - protein, 17 aa, Artificial Sequence
  Synthetically generated peptide
  VARIANT (1)..(17): Xaa = Any Amino Acid
CCEXWACXNPAXCTXGA

SEQ ID NO: 15093 - protein, 17 aa, Artificial Sequence
  Synthetically generated peptide
  VARIANT (1)..(17): Xaa = Any Amino Acid
CCEXWACXNPAXCTGXA

SEQ ID NO: 15094 - protein, 16 aa, Artificial Sequence
  Synthetically generated peptide
  VARIANT (1)..(16): Xaa = Any Amino Acid
CCEXWACXNPACXTGA

SEQ ID NO: 15095 - protein, 17 aa, Artificial Sequence
  Synthetically generated peptide
  VARIANT (1)..(17): Xaa = Any Amino Acid
CCEXWACXNPACXXTGA

SEQ ID NO: 15096 - protein, 17 aa, Artificial Sequence
  Synthetically generated peptide
  VARIANT (1)..(17): Xaa = Any Amino Acid
CCEXWACXNPACXTXGA

SEQ ID NO: 15097 - protein, 17 aa, Artificial Sequence
  Synthetically generated peptide
  VARIANT (1)..(17): Xaa = Any Amino Acid
CCEXWACXNPACXTGXA

SEQ ID NO: 15098 - protein, 16 aa, Artificial Sequence
  Synthetically generated peptide
  VARIANT (1)..(16): Xaa = Any Amino Acid
CCEXWACXNPACTXGA

SEQ ID NO: 15099 - protein, 17 aa, Artificial Sequence
  Synthetically generated peptide
  VARIANT (1)..(17): Xaa = Any Amino Acid
CCEXWACXNPACTXXGA

SEQ ID NO: 15100 - protein, 17 aa, Artificial Sequence
  Synthetically generated peptide
  VARIANT (1)..(17): Xaa = Any Amino Acid
CCEXWACXNPACTXGXA

SEQ ID NO: 15101 - protein, 16 aa, Artificial Sequence
  Synthetically generated peptide
  VARIANT (1)..(16): Xaa = Any Amino Acid
CCEXWACXNPACTGXA

SEQ ID NO: 15102 - protein, 17 aa, Artificial Sequence
  Synthetically generated peptide
  VARIANT (1)..(17): Xaa = Any Amino Acid
CCEXWACXNPACTGXXA

SEQ ID NO: 15103 - protein, 15 aa, Artificial Sequence
  Synthetically generated peptide
  VARIANT (1)..(15): Xaa = Any Amino Acid
CCEXWACNXPACTGA

SEQ ID NO: 15104 - protein, 16 aa, Artificial Sequence
  Synthetically generated peptide
  VARIANT (1)..(16): Xaa = Any Amino Acid
CCEXWACNXXPACTGA

SEQ ID NO: 15105 - protein, 17 aa, Artificial Sequence
  Synthetically generated peptide
  VARIANT (1)..(17): Xaa = Any Amino Acid
CCEXWACNXXXPACTGA

SEQ ID NO: 15106 - protein, 17 aa, Artificial Sequence
  Synthetically generated peptide
  VARIANT (1)..(17): Xaa = Any Amino Acid
CCEXWACNXXPXACTGA

SEQ ID NO: 15107 - protein, 17 aa, Artificial Sequence
  Synthetically generated peptide
  VARIANT (1)..(17): Xaa = Any Amino Acid
CCEXWACNXXPAXCTGA

SEQ ID NO: 15108 - protein, 17 aa, Artificial Sequence
  Synthetically generated peptide
  VARIANT (1)..(17): Xaa = Any Amino Acid
CCEXWACNXXPACXTGA

SEQ ID NO: 15109 - protein, 17 aa, Artificial Sequence
  Synthetically generated peptide
  VARIANT (1)..(17): Xaa = Any Amino Acid
CCEXWACNXXPACTXGA

SEQ ID NO: 15110 - protein, 17 aa, Artificial Sequence
  Synthetically generated peptide
  VARIANT (1)..(17): Xaa = Any Amino Acid
CCEXWACNXXPACTGXA

SEQ ID NO: 15111 - protein, 16 aa, Artificial Sequence
  Synthetically generated peptide
  VARIANT (1)..(16): Xaa = Any Amino Acid
CCEXWACNXPXACTGA

SEQ ID NO: 15112 - protein, 17 aa, Artificial Sequence
  Synthetically generated peptide
  VARIANT (1)..(17): Xaa = Any Amino Acid
CCEXWACNXPXXACTGA

SEQ ID NO: 15113 - protein, 17 aa, Artificial Sequence
  Synthetically generated peptide
  VARIANT (1)..(17): Xaa = Any Amino Acid
CCEXWACNXPXAXCTGA

SEQ ID NO: 15114 - protein, 17 aa, Artificial Sequence
  Synthetically generated peptide
  VARIANT (1)..(17): Xaa = Any Amino Acid
CCEXWACNXPXACXTGA

SEQ ID NO: 15115 - protein, 17 aa, Artificial Sequence
  Synthetically generated peptide
  VARIANT (1)..(17): Xaa = Any Amino Acid
CCEXWACNXPXACTXGA

SEQ ID NO: 15116 - protein, 17 aa, Artificial Sequence
  Synthetically generated peptide
  VARIANT (1)..(17): Xaa = Any Amino Acid
CCEXWACNXPXACTGXA

SEQ ID NO: 15117 - protein, 16 aa, Artificial Sequence
  Synthetically generated peptide
  VARIANT (1)..(16): Xaa = Any Amino Acid
CCEXWACNXPAXCTGA

SEQ ID NO: 15118 - protein, 17 aa, Artificial Sequence
  Synthetically generated peptide
  VARIANT (1)..(17): Xaa = Any Amino Acid
CCEXWACNXPAXXCTGA

SEQ ID NO: 15119 - protein, 17 aa, Artificial Sequence
  Synthetically generated peptide
  VARIANT (1)..(17): Xaa = Any Amino Acid
CCEXWACNXPAXCXTGA

SEQ ID NO: 15120 - protein, 17 aa, Artificial Sequence
  Synthetically generated peptide
  VARIANT (1)..(17): Xaa = Any Amino Acid
CCEXWACNXPAXCTXGA

SEQ ID NO: 15121 - protein, 17 aa, Artificial Sequence
  Synthetically generated peptide
  VARIANT (1)..(17): Xaa = Any Amino Acid
CCEXWACNXPAXCTGXA

SEQ ID NO: 15122 - protein, 16 aa, Artificial Sequence
  Synthetically generated peptide
  VARIANT (1)..(16): Xaa = Any Amino Acid
CCEXWACNXPACXTGA

SEQ ID NO: 15123 - protein, 17 aa, Artificial Sequence
  Synthetically generated peptide
  VARIANT (1)..(17): Xaa = Any Amino Acid
CCEXWACNXPACXXTGA

SEQ ID NO: 15124 - protein, 17 aa, Artificial Sequence
  Synthetically generated peptide
  VARIANT (1)..(17): Xaa = Any Amino Acid
CCEXWACNXPACXTXGA

SEQ ID NO: 15125 - protein, 17 aa, Artificial Sequence
  Synthetically generated peptide
  VARIANT (1)..(17): Xaa = Any Amino Acid
CCEXWACNXPACXTGXA

SEQ ID NO: 15126 - protein, 16 aa, Artificial Sequence
  Synthetically generated peptide
  VARIANT (1)..(16): Xaa = Any Amino Acid
CCEXWACNXPACTXGA

SEQ ID NO: 15127 - protein, 17 aa, Artificial Sequence
  Synthetically generated peptide
  VARIANT (1)..(17): Xaa = Any Amino Acid
CCEXWACNXPACTXXGA

SEQ ID NO: 15128 - protein, 17 aa, Artificial Sequence
  Synthetically generated peptide
  VARIANT (1)..(17): Xaa = Any Amino Acid
CCEXWACNXPACTXGXA

SEQ ID NO: 15129 - protein, 16 aa, Artificial Sequence
  Synthetically generated peptide
  VARIANT (1)..(16): Xaa = Any Amino Acid
CCEXWACNXPACTGXA

SEQ ID NO: 15130 - protein, 17 aa, Artificial Sequence
  Synthetically generated peptide
  VARIANT (1)..(17): Xaa = Any Amino Acid
CCEXWACNXPACTGXXA

SEQ ID NO: 15131 - protein, 15 aa, Artificial Sequence
  Synthetically generated peptide
  VARIANT (1)..(15): Xaa = Any Amino Acid
CCEXWACNPXACTGA

SEQ ID NO: 15132 - protein, 16 aa, Artificial Sequence
  Synthetically generated peptide
  VARIANT (1)..(16): Xaa = Any Amino Acid
CCEXWACNPXXACTGA

SEQ ID NO: 15133 - protein, 17 aa, Artificial Sequence
  Synthetically generated peptide
  VARIANT (1)..(17): Xaa = Any Amino Acid
CCEXWACNPXXXACTGA

SEQ ID NO: 15134 - protein, 17 aa, Artificial Sequence
  Synthetically generated peptide
  VARIANT (1)..(17): Xaa = Any Amino Acid
CCEXWACNPXXAXCTGA

SEQ ID NO: 15135 - protein, 17 aa, Artificial Sequence
  Synthetically generated peptide
  VARIANT (1)..(17): Xaa = Any Amino Acid
CCEXWACNPXXACXTGA

SEQ ID NO: 15136 - protein, 17 aa, Artificial Sequence
  Synthetically generated peptide
  VARIANT (1)..(17): Xaa = Any Amino Acid
CCEXWACNPXXACTXGA

SEQ ID NO: 15137 - protein, 17 aa, Artificial Sequence
  Synthetically generated peptide
  VARIANT (1)..(17): Xaa = Any Amino Acid
CCEXWACNPXXACTGXA

SEQ ID NO: 15138 - protein, 16 aa, Artificial Sequence
  Synthetically generated peptide
  VARIANT (1)..(16): Xaa = Any Amino Acid
CCEXWACNPXAXCTGA

SEQ ID NO: 15139 - protein, 17 aa, Artificial Sequence
  Synthetically generated peptide
  VARIANT (1)..(17): Xaa = Any Amino Acid
CCEXWACNPXAXXCTGA

SEQ ID NO: 15140 - protein, 17 aa, Artificial Sequence
  Synthetically generated peptide
  VARIANT (1)..(17): Xaa = Any Amino Acid
CCEXWACNPXAXCXTGA

SEQ ID NO: 15141 - protein, 17 aa, Artificial Sequence
  Synthetically generated peptide
  VARIANT (1)..(17): Xaa = Any Amino Acid
CCEXWACNPXAXCTXGA

SEQ ID NO: 15142 - protein, 17 aa, Artificial Sequence
  Synthetically generated peptide
  VARIANT (1)..(17): Xaa = Any Amino Acid
CCEXWACNPXAXCTGXA

SEQ ID NO: 15143 - protein, 16 aa, Artificial Sequence
  Synthetically generated peptide
  VARIANT (1)..(16): Xaa = Any Amino Acid
CCEXWACNPXACXTGA

SEQ ID NO: 15144 - protein, 17 aa, Artificial Sequence
  Synthetically generated peptide
  VARIANT (1)..(17): Xaa = Any Amino Acid
CCEXWACNPXACXXTGA

SEQ ID NO: 15145 - protein, 17 aa, Artificial Sequence
  Synthetically generated peptide
  VARIANT (1)..(17): Xaa = Any Amino Acid
CCEXWACNPXACXTXGA

SEQ ID NO: 15146 - protein, 17 aa, Artificial Sequence
  Synthetically generated peptide
  VARIANT (1)..(17): Xaa = Any Amino Acid
CCEXWACNPXACXTGXA

SEQ ID NO: 15147 - protein, 16 aa, Artificial Sequence
  Synthetically generated peptide
  VARIANT (1)..(16): Xaa = Any Amino Acid
CCEXWACNPXACTXGA

SEQ ID NO: 15148 - protein, 17 aa, Artificial Sequence
  Synthetically generated peptide
  VARIANT (1)..(17): Xaa = Any Amino Acid
CCEXWACNPXACTXXGA

SEQ ID NO: 15149 - protein, 17 aa, Artificial Sequence
  Synthetically generated peptide
  VARIANT (1)..(17): Xaa = Any Amino Acid
CCEXWACNPXACTXGXA

SEQ ID NO: 15150 - protein, 16 aa, Artificial Sequence
  Synthetically generated peptide
  VARIANT (1)..(16): Xaa = Any Amino Acid
CCEXWACNPXACTGXA

SEQ ID NO: 15151 - protein, 17 aa, Artificial Sequence
  Synthetically generated peptide
  VARIANT (1)..(17): Xaa = Any Amino Acid
CCEXWACNPXACTGXXA

SEQ ID NO: 15152 - protein, 15 aa, Artificial Sequence
  Synthetically generated peptide
  VARIANT (1)..(15): Xaa = Any Amino Acid
CCEXWACNPAXCTGA

SEQ ID NO: 15153 - protein, 16 aa, Artificial Sequence
  Synthetically generated peptide
  VARIANT (1)..(16): Xaa = Any Amino Acid
CCEXWACNPAXXCTGA

SEQ ID NO: 15154 - protein, 17 aa, Artificial Sequence
  Synthetically generated peptide
  VARIANT (1)..(17): Xaa = Any Amino Acid
CCEXWACNPAXXXCTGA

SEQ ID NO: 15155 - protein, 17 aa, Artificial Sequence
  Synthetically generated peptide
  VARIANT (1)..(17): Xaa = Any Amino Acid
CCEXWACNPAXXCXTGA

SEQ ID NO: 15156 - protein, 17 aa, Artificial Sequence
  Synthetically generated peptide
  VARIANT (1)..(17): Xaa = Any Amino Acid
CCEXWACNPAXXCTXGA

SEQ ID NO: 15157 - protein, 17 aa, Artificial Sequence
  Synthetically generated peptide
  VARIANT (1)..(17): Xaa = Any Amino Acid
CCEXWACNPAXXCTGXA

SEQ ID NO: 15158 - protein, 16 aa, Artificial Sequence
  Synthetically generated peptide
  VARIANT (1)..(16): Xaa = Any Amino Acid
CCEXWACNPAXCXTGA

SEQ ID NO: 15159 - protein, 17 aa, Artificial Sequence
  Synthetically generated peptide
  VARIANT (1)..(17): Xaa = Any Amino Acid
CCEXWACNPAXCXXTGA

SEQ ID NO: 15160 - protein, 17 aa, Artificial Sequence
  Synthetically generated peptide
  VARIANT (1)..(17): Xaa = Any Amino Acid
CCEXWACNPAXCXTXGA

SEQ ID NO: 15161 - protein, 17 aa, Artificial Sequence
  Synthetically generated peptide
  VARIANT (1)..(17): Xaa = Any Amino Acid
CCEXWACNPAXCXTGXA

SEQ ID NO: 15162 - protein, 16 aa, Artificial Sequence
  Synthetically generated peptide
  VARIANT (1)..(16): Xaa = Any Amino Acid
CCEXWACNPAXCTXGA

SEQ ID NO: 15163 - protein, 17 aa, Artificial Sequence
  Synthetically generated peptide
  VARIANT (1)..(17): Xaa = Any Amino Acid
CCEXWACNPAXCTXXGA

SEQ ID NO: 15164 - protein, 17 aa, Artificial Sequence
  Synthetically generated peptide
  VARIANT (1)..(17): Xaa = Any Amino Acid
CCEXWACNPAXCTXGXA

SEQ ID NO: 15165 - protein, 16 aa, Artificial Sequence
  Synthetically generated peptide
  VARIANT (1)..(16): Xaa = Any Amino Acid
CCEXWACNPAXCTGXA

SEQ ID NO: 15166 - protein, 17 aa, Artificial Sequence
  Synthetically generated peptide
  VARIANT (1)..(17): Xaa = Any Amino Acid
CCEXWACNPAXCTGXXA

SEQ ID NO: 15167 - protein, 15 aa, Artificial Sequence
  Synthetically generated peptide
  VARIANT (1)..(15): Xaa = Any Amino Acid
CCEXWACNPACXTGA

SEQ ID NO: 15168 - protein, 16 aa, Artificial Sequence
  Synthetically generated peptide
  VARIANT (1)..(16): Xaa = Any Amino Acid
CCEXWACNPACXXTGA

SEQ ID NO: 15169 - protein, 17 aa, Artificial Sequence
  Synthetically generated peptide
  VARIANT (1)..(17): Xaa = Any Amino Acid
CCEXWACNPACXXXTGA

SEQ ID NO: 15170 - protein, 17 aa, Artificial Sequence
  Synthetically generated peptide
  VARIANT (1)..(17): Xaa = Any Amino Acid
CCEXWACNPACXXTXGA

SEQ ID NO: 15171 - protein, 17 aa, Artificial Sequence
  Synthetically generated peptide
  VARIANT (1)..(17): Xaa = Any Amino Acid
CCEXWACNPACXXTGXA

SEQ ID NO: 15172 - protein, 16 aa, Artificial Sequence
  Synthetically generated peptide
  VARIANT (1)..(16): Xaa = Any Amino Acid
CCEXWACNPACXTXGA

SEQ ID NO: 15173 - protein, 17 aa, Artificial Sequence
  Synthetically generated peptide
  VARIANT (1)..(17): Xaa = Any Amino Acid
CCEXWACNPACXTXXGA

SEQ ID NO: 15174 - protein, 17 aa, Artificial Sequence
  Synthetically generated peptide
  VARIANT (1)..(17): Xaa = Any Amino Acid
CCEXWACNPACXTXGXA

SEQ ID NO: 15175 - protein, 16 aa, Artificial Sequence
  Synthetically generated peptide
  VARIANT (1)..(16): Xaa = Any Amino Acid
CCEXWACNPACXTGXA

SEQ ID NO: 15176 - protein, 17 aa, Artificial Sequence
  Synthetically generated peptide
  VARIANT (1)..(17): Xaa = Any Amino Acid
CCEXWACNPACXTGXXA

SEQ ID NO: 15177 - protein, 15 aa, Artificial Sequence
  Synthetically generated peptide
  VARIANT (1)..(15): Xaa = Any Amino Acid
CCEXWACNPACTXGA

SEQ ID NO: 15178 - protein, 16 aa, Artificial Sequence
  Synthetically generated peptide
  VARIANT (1)..(16): Xaa = Any Amino Acid
CCEXWACNPACTXXGA

SEQ ID NO: 15179 - protein, 17 aa, Artificial Sequence
  Synthetically generated peptide
  VARIANT (1)..(17): Xaa = Any Amino Acid
CCEXWACNPACTXXXGA

SEQ ID NO: 15180 - protein, 17 aa, Artificial Sequence
  Synthetically generated peptide
  VARIANT (1)..(17): Xaa = Any Amino Acid
CCEXWACNPACTXXGXA

SEQ ID NO: 15181 - protein, 16 aa, Artificial Sequence
  Synthetically generated peptide
  VARIANT (1)..(16): Xaa = Any Amino Acid
CCEXWACNPACTXGXA

SEQ ID NO: 15182 - protein, 17 aa, Artificial Sequence
  Synthetically generated peptide
  VARIANT (1)..(17): Xaa = Any Amino Acid
CCEXWACNPACTXGXXA

SEQ ID NO: 15183 - protein, 15 aa, Artificial Sequence
  Synthetically generated peptide
  VARIANT (1)..(15): Xaa = Any Amino Acid
CCEXWACNPACTGXA

SEQ ID NO: 15184 - protein, 16 aa, Artificial Sequence
  Synthetically generated peptide
  VARIANT (1)..(16): Xaa = Any Amino Acid
CCEXWACNPACTGXXA

SEQ ID NO: 15185 - protein, 17 aa, Artificial Sequence
  Synthetically generated peptide
  VARIANT (1)..(17): Xaa = Any Amino Acid
CCEXWACNPACTGXXXA

SEQ ID NO: 15186 - protein, 14 aa, Artificial Sequence
  Synthetically generated peptide
  VARIANT (1)..(14): Xaa = Any Amino Acid
CCEWXACNPACTGA

SEQ ID NO: 15187 - protein, 15 aa, Artificial Sequence
  Synthetically generated peptide
  VARIANT (1)..(15): Xaa = Any Amino Acid
CCEWXXACNPACTGA

SEQ ID NO: 15188 - protein, 16 aa, Artificial Sequence
  Synthetically generated peptide
  VARIANT (1)..(16): Xaa = Any Amino Acid
CCEWXXXACNPACTGA

SEQ ID NO: 15189 - protein, 17 aa, Artificial Sequence
  Synthetically generated peptide
  VARIANT (1)..(17): Xaa = Any Amino Acid
CCEWXXXXACNPACTGA

SEQ ID NO: 15190 - protein, 17 aa, Artificial Sequence
  Synthetically generated peptide
  VARIANT (1)..(17): Xaa = Any Amino Acid
CCEWXXXACXNPACTGA

SEQ ID NO: 15191 - protein, 17 aa, Artificial Sequence
  Synthetically generated peptide
  VARIANT (1)..(17): Xaa = Any Amino Acid
CCEWXXXACNXPACTGA

SEQ ID NO: 15192 - protein, 17 aa, Artificial Sequence
  Synthetically generated peptide
  VARIANT (1)..(17): Xaa = Any Amino Acid
CCEWXXXACNPXACTGA

SEQ ID NO: 15193 - protein, 17 aa, Artificial Sequence
  Synthetically generated peptide
  VARIANT (1)..(17): Xaa = Any Amino Acid
CCEWXXXACNPAXCTGA

SEQ ID NO: 15194 - protein, 17 aa, Artificial Sequence
  Synthetically generated peptide
  VARIANT (1)..(17): Xaa = Any Amino Acid
CCEWXXXACNPACXTGA

SEQ ID NO: 15195 - protein, 17 aa, Artificial Sequence
  Synthetically generated peptide
  VARIANT (1)..(17): Xaa = Any Amino Acid
CCEWXXXACNPACTXGA

SEQ ID NO: 15196 - protein, 17 aa, Artificial Sequence
  Synthetically generated peptide
  VARIANT (1)..(17): Xaa = Any Amino Acid
CCEWXXXACNPACTGXA

SEQ ID NO: 15197 - protein, 16 aa, Artificial Sequence
  Synthetically generated peptide
  VARIANT (1)..(16): Xaa = Any Amino Acid
CCEWXXACXNPACTGA

SEQ ID NO: 15198 - protein, 17 aa, Artificial Sequence
  Synthetically generated peptide
  VARIANT (1)..(17): Xaa = Any Amino Acid
CCEWXXACXXNPACTGA

SEQ ID NO: 15199 - protein, 17 aa, Artificial Sequence
  Synthetically generated peptide
  VARIANT (1)..(17): Xaa = Any Amino Acid
CCEWXXACXNXPACTGA

SEQ ID NO: 15200 - protein, 17 aa, Artificial Sequence
  Synthetically generated peptide
  VARIANT (1)..(17): Xaa = Any Amino Acid
CCEWXXACXNPXACTGA

SEQ ID NO: 15201 - protein, 17 aa, Artificial Sequence
  Synthetically generated peptide
  VARIANT (1)..(17): Xaa = Any Amino Acid
CCEWXXACXNPAXCTGA

SEQ ID NO: 15202 - protein, 17 aa, Artificial Sequence
  Synthetically generated peptide
  VARIANT (1)..(17): Xaa = Any Amino Acid
CCEWXXACXNPACXTGA

SEQ ID NO: 15203 - protein, 17 aa, Artificial Sequence
  Synthetically generated peptide
  VARIANT (1)..(17): Xaa = Any Amino Acid
CCEWXXACXNPACTXGA

SEQ ID NO: 15204 - protein, 17 aa, Artificial Sequence
  Synthetically generated peptide
  VARIANT (1)..(17): Xaa = Any Amino Acid
CCEWXXACXNPACTGXA

SEQ ID NO: 15205 - protein, 16 aa, Artificial Sequence
  Synthetically generated peptide
  VARIANT (1)..(16): Xaa = Any Amino Acid
CCEWXXACNXPACTGA

SEQ ID NO: 15206 - protein, 17 aa, Artificial Sequence
  Synthetically generated peptide
  VARIANT (1)..(17): Xaa = Any Amino Acid
CCEWXXACNXXPACTGA

SEQ ID NO: 15207 - protein, 17 aa, Artificial Sequence
  Synthetically generated peptide
  VARIANT (1)..(17): Xaa = Any Amino Acid
CCEWXXACNXPXACTGA

SEQ ID NO: 15208 - protein, 17 aa, Artificial Sequence
  Synthetically generated peptide
  VARIANT (1)..(17): Xaa = Any Amino Acid
CCEWXXACNXPAXCTGA

SEQ ID NO: 15209 - protein, 17 aa, Artificial Sequence
  Synthetically generated peptide
  VARIANT (1)..(17): Xaa = Any Amino Acid
CCEWXXACNXPACXTGA

SEQ ID NO: 15210 - protein, 17 aa, Artificial Sequence
  Synthetically generated peptide
  VARIANT (1)..(17): Xaa = Any Amino Acid
CCEWXXACNXPACTXGA

SEQ ID NO: 15211 - protein, 17 aa, Artificial Sequence
  Synthetically generated peptide
  VARIANT (1)..(17): Xaa = Any Amino Acid
CCEWXXACNXPACTGXA

SEQ ID NO: 15212 - protein, 16 aa, Artificial Sequence
  Synthetically generated peptide
  VARIANT (1)..(16): Xaa = Any Amino Acid
CCEWXXACNPXACTGA

SEQ ID NO: 15213 - protein, 17 aa, Artificial Sequence
  Synthetically generated peptide
  VARIANT (1)..(17): Xaa = Any Amino Acid
CCEWXXACNPXXACTGA

SEQ ID NO: 15214 - protein, 17 aa, Artificial Sequence
  Synthetically generated peptide
  VARIANT (1)..(17): Xaa = Any Amino Acid
CCEWXXACNPXAXCTGA

SEQ ID NO: 15215 - protein, 17 aa, Artificial Sequence
  Synthetically generated peptide
  VARIANT (1)..(17): Xaa = Any Amino Acid
CCEWXXACNPXACXTGA

SEQ ID NO: 15216 - protein, 17 aa, Artificial Sequence
  Synthetically generated peptide
  VARIANT (1)..(17): Xaa = Any Amino Acid
CCEWXXACNPXACTXGA

SEQ ID NO: 15217 - protein, 17 aa, Artificial Sequence
  Synthetically generated peptide
  VARIANT (1)..(17): Xaa = Any Amino Acid
CCEWXXACNPXACTGXA

SEQ ID NO: 15218 - protein, 16 aa, Artificial Sequence
  Synthetically generated peptide
  VARIANT (1)..(16): Xaa = Any Amino Acid
CCEWXXACNPAXCTGA

SEQ ID NO: 15219 - protein, 17 aa, Artificial Sequence
  Synthetically generated peptide
  VARIANT (1)..(17): Xaa = Any Amino Acid
CCEWXXACNPAXXCTGA

SEQ ID NO: 15220 - protein, 17 aa, Artificial Sequence
  Synthetically generated peptide
  VARIANT (1)..(17): Xaa = Any Amino Acid
CCEWXXACNPAXCXTGA

SEQ ID NO: 15221 - protein, 17 aa, Artificial Sequence
  Synthetically generated peptide
  VARIANT (1)..(17): Xaa = Any Amino Acid
CCEWXXACNPAXCTXGA

SEQ ID NO: 15222 - protein, 17 aa, Artificial Sequence
  Synthetically generated peptide
  VARIANT (1)..(17): Xaa = Any Amino Acid
CCEWXXACNPAXCTGXA

SEQ ID NO: 15223 - protein, 16 aa, Artificial Sequence
  Synthetically generated peptide
  VARIANT (1)..(16): Xaa = Any Amino Acid
CCEWXXACNPACXTGA

SEQ ID NO: 15224 - protein, 17 aa, Artificial Sequence
  Synthetically generated peptide
  VARIANT (1)..(17): Xaa = Any Amino Acid
CCEWXXACNPACXXTGA

SEQ ID NO: 15225 - protein, 17 aa, Artificial Sequence
  Synthetically generated peptide
  VARIANT (1)..(17): Xaa = Any Amino Acid
CCEWXXACNPACXTXGA

SEQ ID NO: 15226 - protein, 17 aa, Artificial Sequence
  Synthetically generated peptide
  VARIANT (1)..(17): Xaa = Any Amino Acid
CCEWXXACNPACXTGXA

SEQ ID NO: 15227 - protein, 16 aa, Artificial Sequence
  Synthetically generated peptide
  VARIANT (1)..(16): Xaa = Any Amino Acid
CCEWXXACNPACTXGA

SEQ ID NO: 15228 - protein, 17 aa, Artificial Sequence
  Synthetically generated peptide
  VARIANT (1)..(17): Xaa = Any Amino Acid
CCEWXXACNPACTXXGA

SEQ ID NO: 15229 - protein, 17 aa, Artificial Sequence
  Synthetically generated peptide
  VARIANT (1)..(17): Xaa = Any Amino Acid
CCEWXXACNPACTXGXA

SEQ ID NO: 15230 - protein, 16 aa, Artificial Sequence
  Synthetically generated peptide
  VARIANT (1)..(16): Xaa = Any Amino Acid
CCEWXXACNPACTGXA

SEQ ID NO: 15231 - protein, 17 aa, Artificial Sequence
  Synthetically generated peptide
  VARIANT (1)..(17): Xaa = Any Amino Acid
CCEWXXACNPACTGXXA

SEQ ID NO: 15232 - protein, 15 aa, Artificial Sequence
  Synthetically generated peptide
  VARIANT (1)..(15): Xaa = Any Amino Acid
CCEWXACXNPACTGA

SEQ ID NO: 15233 - protein, 16 aa, Artificial Sequence
  Synthetically generated peptide
  VARIANT (1)..(16): Xaa = Any Amino Acid
CCEWXACXXNPACTGA

SEQ ID NO: 15234 - protein, 17 aa, Artificial Sequence
  Synthetically generated peptide
  VARIANT (1)..(17): Xaa = Any Amino Acid
CCEWXACXXXNPACTGA

SEQ ID NO: 15235 - protein, 17 aa, Artificial Sequence
  Synthetically generated peptide
  VARIANT (1)..(17): Xaa = Any Amino Acid
CCEWXACXXNXPACTGA

SEQ ID NO: 15236 - protein, 17 aa, Artificial Sequence
  Synthetically generated peptide
  VARIANT (1)..(17): Xaa = Any Amino Acid
CCEWXACXXNPXACTGA

SEQ ID NO: 15237 - protein, 17 aa, Artificial Sequence
  Synthetically generated peptide
  VARIANT (1)..(17): Xaa = Any Amino Acid
CCEWXACXXNPAXCTGA

SEQ ID NO: 15238 - protein, 17 aa, Artificial Sequence
  Synthetically generated peptide
  VARIANT (1)..(17): Xaa = Any Amino Acid
CCEWXACXXNPACXTGA

SEQ ID NO: 15239 - protein, 17 aa, Artificial Sequence
  Synthetically generated peptide
  VARIANT (1)..(17): Xaa = Any Amino Acid
CCEWXACXXNPACTXGA

SEQ ID NO: 15240 - protein, 17 aa, Artificial Sequence
  Synthetically generated peptide
  VARIANT (1)..(17): Xaa = Any Amino Acid
CCEWXACXXNPACTGXA

SEQ ID NO: 15241 - protein, 16 aa, Artificial Sequence
  Synthetically generated peptide
  VARIANT (1)..(16): Xaa = Any Amino Acid
CCEWXACXNXPACTGA

SEQ ID NO: 15242 - protein, 17 aa, Artificial Sequence
  Synthetically generated peptide
  VARIANT (1)..(17): Xaa = Any Amino Acid
CCEWXACXNXXPACTGA

SEQ ID NO: 15243 - protein, 17 aa, Artificial Sequence
  Synthetically generated peptide
  VARIANT (1)..(17): Xaa = Any Amino Acid
CCEWXACXNXPXACTGA

SEQ ID NO: 15244 - protein, 17 aa, Artificial Sequence
  Synthetically generated peptide
  VARIANT (1)..(17): Xaa = Any Amino Acid
CCEWXACXNXPAXCTGA

SEQ ID NO: 15245 - protein, 17 aa, Artificial Sequence
  Synthetically generated peptide
  VARIANT (1)..(17): Xaa = Any Amino Acid
CCEWXACXNXPACXTGA

SEQ ID NO: 15246 - protein, 17 aa, Artificial Sequence
  Synthetically generated peptide
  VARIANT (1)..(17): Xaa = Any Amino Acid
CCEWXACXNXPACTXGA

SEQ ID NO: 15247 - protein, 17 aa, Artificial Sequence
  Synthetically generated peptide
  VARIANT (1)..(17): Xaa = Any Amino Acid
CCEWXACXNXPACTGXA

SEQ ID NO: 15248 - protein, 16 aa, Artificial Sequence
  Synthetically generated peptide
  VARIANT (1)..(16): Xaa = Any Amino Acid
CCEWXACXNPXACTGA

SEQ ID NO: 15249 - protein, 17 aa, Artificial Sequence
  Synthetically generated peptide
  VARIANT (1)..(17): Xaa = Any Amino Acid
CCEWXACXNPXXACTGA

SEQ ID NO: 15250 - protein, 17 aa, Artificial Sequence
  Synthetically generated peptide
  VARIANT (1)..(17): Xaa = Any Amino Acid
CCEWXACXNPXAXCTGA

SEQ ID NO: 15251 - protein, 17 aa, Artificial Sequence
  Synthetically generated peptide
  VARIANT (1)..(17): Xaa = Any Amino Acid
CCEWXACXNPXACXTGA

SEQ ID NO: 15252 - protein, 17 aa, Artificial Sequence
  Synthetically generated peptide
  VARIANT (1)..(17): Xaa = Any Amino Acid
CCEWXACXNPXACTXGA

SEQ ID NO: 15253 - protein, 17 aa, Artificial Sequence
  Synthetically generated peptide
  VARIANT (1)..(17): Xaa = Any Amino Acid
CCEWXACXNPXACTGXA

SEQ ID NO: 15254 - protein, 16 aa, Artificial Sequence
  Synthetically generated peptide
  VARIANT (1)..(16): Xaa = Any Amino Acid
CCEWXACXNPAXCTGA

SEQ ID NO: 15255 - protein, 17 aa, Artificial Sequence
  Synthetically generated peptide
  VARIANT (1)..(17): Xaa = Any Amino Acid
CCEWXACXNPAXXCTGA

SEQ ID NO: 15256 - protein, 17 aa, Artificial Sequence
  Synthetically generated peptide
  VARIANT (1)..(17): Xaa = Any Amino Acid
CCEWXACXNPAXCXTGA

SEQ ID NO: 15257 - protein, 17 aa, Artificial Sequence
  Synthetically generated peptide
  VARIANT (1)..(17): Xaa = Any Amino Acid
CCEWXACXNPAXCTXGA

SEQ ID NO: 15258 - protein, 17 aa, Artificial Sequence
  Synthetically generated peptide
  VARIANT (1)..(17): Xaa = Any Amino Acid
CCEWXACXNPAXCTGXA

SEQ ID NO: 15259 - protein, 16 aa, Artificial Sequence
  Synthetically generated peptide
  VARIANT (1)..(16): Xaa = Any Amino Acid
CCEWXACXNPACXTGA

SEQ ID NO: 15260 - protein, 17 aa, Artificial Sequence
  Synthetically generated peptide
  VARIANT (1)..(17): Xaa = Any Amino Acid
CCEWXACXNPACXXTGA

SEQ ID NO: 15261 - protein, 17 aa, Artificial Sequence
  Synthetically generated peptide
  VARIANT (1)..(17): Xaa = Any Amino Acid
CCEWXACXNPACXTXGA

SEQ ID NO: 15262 - protein, 17 aa, Artificial Sequence
  Synthetically generated peptide
  VARIANT (1)..(17): Xaa = Any Amino Acid
CCEWXACXNPACXTGXA

SEQ ID NO: 15263 - protein, 16 aa, Artificial Sequence
  Synthetically generated peptide
  VARIANT (1)..(16): Xaa = Any Amino Acid
CCEWXACXNPACTXGA

SEQ ID NO: 15264 - protein, 17 aa, Artificial Sequence
  Synthetically generated peptide
  VARIANT (1)..(17): Xaa = Any Amino Acid
CCEWXACXNPACTXXGA

SEQ ID NO: 15265 - protein, 17 aa, Artificial Sequence
  Synthetically generated peptide
  VARIANT (1)..(17): Xaa = Any Amino Acid
CCEWXACXNPACTXGXA

SEQ ID NO: 15266 - protein, 16 aa, Artificial Sequence
  Synthetically generated peptide
  VARIANT (1)..(16): Xaa = Any Amino Acid
CCEWXACXNPACTGXA

SEQ ID NO: 15267 - protein, 17 aa, Artificial Sequence
  Synthetically generated peptide
  VARIANT (1)..(17): Xaa = Any Amino Acid
CCEWXACXNPACTGXXA

SEQ ID NO: 15268 - protein, 15 aa, Artificial Sequence
  Synthetically generated peptide
  VARIANT (1)..(15): Xaa = Any Amino Acid
CCEWXACNXPACTGA

SEQ ID NO: 15269 - protein, 16 aa, Artificial Sequence
  Synthetically generated peptide
  VARIANT (1)..(16): Xaa = Any Amino Acid
CCEWXACNXXPACTGA

SEQ ID NO: 15270 - protein, 17 aa, Artificial Sequence
  Synthetically generated peptide
  VARIANT (1)..(17): Xaa = Any Amino Acid
CCEWXACNXXXPACTGA

SEQ ID NO: 15271 - protein, 17 aa, Artificial Sequence
  Synthetically generated peptide
  VARIANT (1)..(17): Xaa = Any Amino Acid
CCEWXACNXXPXACTGA

SEQ ID NO: 15272 - protein, 17 aa, Artificial Sequence
  Synthetically generated peptide
  VARIANT (1)..(17): Xaa = Any Amino Acid
CCEWXACNXXPAXCTGA

SEQ ID NO: 15273 - protein, 17 aa, Artificial Sequence
  Synthetically generated peptide
  VARIANT (1)..(17): Xaa = Any Amino Acid
CCEWXACNXXPACXTGA

SEQ ID NO: 15274 - protein, 17 aa, Artificial Sequence
  Synthetically generated peptide
  VARIANT (1)..(17): Xaa = Any Amino Acid
CCEWXACNXXPACTXGA

SEQ ID NO: 15275 - protein, 17 aa, Artificial Sequence
  Synthetically generated peptide
  VARIANT (1)..(17): Xaa = Any Amino Acid
CCEWXACNXXPACTGXA

SEQ ID NO: 15276 - protein, 16 aa, Artificial Sequence
  Synthetically generated peptide
  VARIANT (1)..(16): Xaa = Any Amino Acid
CCEWXACNXPXACTGA

SEQ ID NO: 15277 - protein, 17 aa, Artificial Sequence
  Synthetically generated peptide
  VARIANT (1)..(17): Xaa = Any Amino Acid
CCEWXACNXPXXACTGA

SEQ ID NO: 15278 - protein, 17 aa, Artificial Sequence
  Synthetically generated peptide
  VARIANT (1)..(17): Xaa = Any Amino Acid
CCEWXACNXPXAXCTGA

SEQ ID NO: 15279 - protein, 17 aa, Artificial Sequence
  Synthetically generated peptide
  VARIANT (1)..(17): Xaa = Any Amino Acid
CCEWXACNXPXACXTGA

SEQ ID NO: 15280 - protein, 17 aa, Artificial Sequence
  Synthetically generated peptide
  VARIANT (1)..(17): Xaa = Any Amino Acid
CCEWXACNXPXACTXGA

SEQ ID NO: 15281 - protein, 17 aa, Artificial Sequence
  Synthetically generated peptide
  VARIANT (1)..(17): Xaa = Any Amino Acid
CCEWXACNXPXACTGXA

SEQ ID NO: 15282 - protein, 16 aa, Artificial Sequence
  Synthetically generated peptide
  VARIANT (1)..(16): Xaa = Any Amino Acid
CCEWXACNXPAXCTGA

SEQ ID NO: 15283 - protein, 17 aa, Artificial Sequence
  Synthetically generated peptide
  VARIANT (1)..(17): Xaa = Any Amino Acid
CCEWXACNXPAXXCTGA

SEQ ID NO: 15284 - protein, 17 aa, Artificial Sequence
  Synthetically generated peptide
  VARIANT (1)..(17): Xaa = Any Amino Acid
CCEWXACNXPAXCXTGA

SEQ ID NO: 15285 - protein, 17 aa, Artificial Sequence
  Synthetically generated peptide
  VARIANT (1)..(17): Xaa = Any Amino Acid
CCEWXACNXPAXCTXGA

SEQ ID NO: 15286 - protein, 17 aa, Artificial Sequence
  Synthetically generated peptide
  VARIANT (1)..(17): Xaa = Any Amino Acid
CCEWXACNXPAXCTGXA

SEQ ID NO: 15287 - protein, 16 aa, Artificial Sequence
  Synthetically generated peptide
  VARIANT (1)..(16): Xaa = Any Amino Acid
CCEWXACNXPACXTGA

SEQ ID NO: 15288 - protein, 17 aa, Artificial Sequence
  Synthetically generated peptide
  VARIANT (1)..(17): Xaa = Any Amino Acid
CCEWXACNXPACXXTGA

SEQ ID NO: 15289 - protein, 17 aa, Artificial Sequence
  Synthetically generated peptide
  VARIANT (1)..(17): Xaa = Any Amino Acid
CCEWXACNXPACXTXGA

SEQ ID NO: 15290 - protein, 17 aa, Artificial Sequence
  Synthetically generated peptide
  VARIANT (1)..(17): Xaa = Any Amino Acid
CCEWXACNXPACXTGXA

SEQ ID NO: 15291 - protein, 16 aa, Artificial Sequence
  Synthetically generated peptide
  VARIANT (1)..(16): Xaa = Any Amino Acid
CCEWXACNXPACTXGA

SEQ ID NO: 15292 - protein, 17 aa, Artificial Sequence
  Synthetically generated peptide
  VARIANT (1)..(17): Xaa = Any Amino Acid
CCEWXACNXPACTXXGA

SEQ ID NO: 15293 - protein, 17 aa, Artificial Sequence
  Synthetically generated peptide
  VARIANT (1)..(17): Xaa = Any Amino Acid
CCEWXACNXPACTXGXA

SEQ ID NO: 15294 - protein, 16 aa, Artificial Sequence
  Synthetically generated peptide
  VARIANT (1)..(16): Xaa = Any Amino Acid
CCEWXACNXPACTGXA

SEQ ID NO: 15295 - protein, 17 aa, Artificial Sequence
  Synthetically generated peptide
  VARIANT (1)..(17): Xaa = Any Amino Acid
CCEWXACNXPACTGXXA

SEQ ID NO: 15296 - protein, 15 aa, Artificial Sequence
  Synthetically generated peptide
  VARIANT (1)..(15): Xaa = Any Amino Acid
CCEWXACNPXACTGA

SEQ ID NO: 15297 - protein, 16 aa, Artificial Sequence
  Synthetically generated peptide
  VARIANT (1)..(16): Xaa = Any Amino Acid
CCEWXACNPXXACTGA

SEQ ID NO: 15298 - protein, 17 aa, Artificial Sequence
  Synthetically generated peptide
  VARIANT (1)..(17): Xaa = Any Amino Acid
CCEWXACNPXXXACTGA

SEQ ID NO: 15299 - protein, 17 aa, Artificial Sequence
  Synthetically generated peptide
  VARIANT (1)..(17): Xaa = Any Amino Acid
CCEWXACNPXXAXCTGA

SEQ ID NO: 15300 - protein, 17 aa, Artificial Sequence
  Synthetically generated peptide
  VARIANT (1)..(17): Xaa = Any Amino Acid
CCEWXACNPXXACXTGA

SEQ ID NO: 15301 - protein, 17 aa, Artificial Sequence
  Synthetically generated peptide
  VARIANT (1)..(17): Xaa = Any Amino Acid
CCEWXACNPXXACTXGA

SEQ ID NO: 15302 - protein, 17 aa, Artificial Sequence
  Synthetically generated peptide
  VARIANT (1)..(17): Xaa = Any Amino Acid
CCEWXACNPXXACTGXA

SEQ ID NO: 15303 - protein, 16 aa, Artificial Sequence
  Synthetically generated peptide
  VARIANT (1)..(16): Xaa = Any Amino Acid
CCEWXACNPXAXCTGA

SEQ ID NO: 15304 - protein, 17 aa, Artificial Sequence
  Synthetically generated peptide
  VARIANT (1)..(17): Xaa = Any Amino Acid
CCEWXACNPXAXXCTGA

SEQ ID NO: 15305 - protein, 17 aa, Artificial Sequence
  Synthetically generated peptide
  VARIANT (1)..(17): Xaa = Any Amino Acid
CCEWXACNPXAXCXTGA

SEQ ID NO: 15306 - protein, 17 aa, Artificial Sequence
  Synthetically generated peptide
  VARIANT (1)..(17): Xaa = Any Amino Acid
CCEWXACNPXAXCTXGA

SEQ ID NO: 15307 - protein, 17 aa, Artificial Sequence
  Synthetically generated peptide
  VARIANT (1)..(17): Xaa = Any Amino Acid
CCEWXACNPXAXCTGXA

SEQ ID NO: 15308 - protein, 16 aa, Artificial Sequence
  Synthetically generated peptide
  VARIANT (1)..(16): Xaa = Any Amino Acid
CCEWXACNPXACXTGA

SEQ ID NO: 15309 - protein, 17 aa, Artificial Sequence
  Synthetically generated peptide
  VARIANT (1)..(17): Xaa = Any Amino Acid
CCEWXACNPXACXXTGA

SEQ ID NO: 15310 - protein, 17 aa, Artificial Sequence
  Synthetically generated peptide
  VARIANT (1)..(17): Xaa = Any Amino Acid
CCEWXACNPXACXTXGA

SEQ ID NO: 15311 - protein, 17 aa, Artificial Sequence
  Synthetically generated peptide
  VARIANT (1)..(17): Xaa = Any Amino Acid
CCEWXACNPXACXTGXA

SEQ ID NO: 15312 - protein, 16 aa, Artificial Sequence
  Synthetically generated peptide
  VARIANT (1)..(16): Xaa = Any Amino Acid
CCEWXACNPXACTXGA

SEQ ID NO: 15313 - protein, 17 aa, Artificial Sequence
  Synthetically generated peptide
  VARIANT (1)..(17): Xaa = Any Amino Acid
CCEWXACNPXACTXXGA

SEQ ID NO: 15314 - protein, 17 aa, Artificial Sequence
  Synthetically generated peptide
  VARIANT (1)..(17): Xaa = Any Amino Acid
CCEWXACNPXACTXGXA

SEQ ID NO: 15315 - protein, 16 aa, Artificial Sequence
  Synthetically generated peptide
  VARIANT (1)..(16): Xaa = Any Amino Acid
CCEWXACNPXACTGXA

SEQ ID NO: 15316 - protein, 17 aa, Artificial Sequence
  Synthetically generated peptide
  VARIANT (1)..(17): Xaa = Any Amino Acid
CCEWXACNPXACTGXXA

SEQ ID NO: 15317 - protein, 15 aa, Artificial Sequence
  Synthetically generated peptide
  VARIANT (1)..(15): Xaa = Any Amino Acid
CCEWXACNPAXCTGA

SEQ ID NO: 15318 - protein, 16 aa, Artificial Sequence
  Synthetically generated peptide
  VARIANT (1)..(16): Xaa = Any Amino Acid
CCEWXACNPAXXCTGA

SEQ ID NO: 15319 - protein, 17 aa, Artificial Sequence
  Synthetically generated peptide
  VARIANT (1)..(17): Xaa = Any Amino Acid
CCEWXACNPAXXXCTGA

SEQ ID NO: 15320 - protein, 17 aa, Artificial Sequence
  Synthetically generated peptide
  VARIANT (1)..(17): Xaa = Any Amino Acid
CCEWXACNPAXXCXTGA

SEQ ID NO: 15321 - protein, 17 aa, Artificial Sequence
  Synthetically generated peptide
  VARIANT (1)..(17): Xaa = Any Amino Acid
CCEWXACNPAXXCTXGA

SEQ ID NO: 15322 - protein, 17 aa, Artificial Sequence
  Synthetically generated peptide
  VARIANT (1)..(17): Xaa = Any Amino Acid
CCEWXACNPAXXCTGXA

SEQ ID NO: 15323 - protein, 16 aa, Artificial Sequence
  Synthetically generated peptide
  VARIANT (1)..(16): Xaa = Any Amino Acid
CCEWXACNPAXCXTGA

SEQ ID NO: 15324 - protein, 17 aa, Artificial Sequence
  Synthetically generated peptide
  VARIANT (1)..(17): Xaa = Any Amino Acid
CCEWXACNPAXCXXTGA

SEQ ID NO: 15325 - protein, 17 aa, Artificial Sequence
  Synthetically generated peptide
  VARIANT (1)..(17): Xaa = Any Amino Acid
CCEWXACNPAXCXTXGA

SEQ ID NO: 15326 - protein, 17 aa, Artificial Sequence
  Synthetically generated peptide
  VARIANT (1)..(17): Xaa = Any Amino Acid
CCEWXACNPAXCXTGXA

SEQ ID NO: 15327 - protein, 16 aa, Artificial Sequence
  Synthetically generated peptide
  VARIANT (1)..(16): Xaa = Any Amino Acid
CCEWXACNPAXCTXGA

SEQ ID NO: 15328 - protein, 17 aa, Artificial Sequence
  Synthetically generated peptide
  VARIANT (1)..(17): Xaa = Any Amino Acid
CCEWXACNPAXCTXXGA

SEQ ID NO: 15329 - protein, 17 aa, Artificial Sequence
  Synthetically generated peptide
  VARIANT (1)..(17): Xaa = Any Amino Acid
CCEWXACNPAXCTXGXA

SEQ ID NO: 15330 - protein, 16 aa, Artificial Sequence
  Synthetically generated peptide
  VARIANT (1)..(16): Xaa = Any Amino Acid
CCEWXACNPAXCTGXA

SEQ ID NO: 15331 - protein, 17 aa, Artificial Sequence
  Synthetically generated peptide
  VARIANT (1)..(17): Xaa = Any Amino Acid
CCEWXACNPAXCTGXXA

SEQ ID NO: 15332 - protein, 15 aa, Artificial Sequence
  Synthetically generated peptide
  VARIANT (1)..(15): Xaa = Any Amino Acid
CCEWXACNPACXTGA

SEQ ID NO: 15333 - protein, 16 aa, Artificial Sequence
  Synthetically generated peptide
  VARIANT (1)..(16): Xaa = Any Amino Acid
CCEWXACNPACXXTGA

SEQ ID NO: 15334 - protein, 17 aa, Artificial Sequence
  Synthetically generated peptide
  VARIANT (1)..(17): Xaa = Any Amino Acid
CCEWXACNPACXXXTGA

SEQ ID NO: 15335 - protein, 17 aa, Artificial Sequence
  Synthetically generated peptide
  VARIANT (1)..(17): Xaa = Any Amino Acid
CCEWXACNPACXXTXGA

SEQ ID NO: 15336 - protein, 17 aa, Artificial Sequence
  Synthetically generated peptide
  VARIANT (1)..(17): Xaa = Any Amino Acid
CCEWXACNPACXXTGXA

SEQ ID NO: 15337 - protein, 16 aa, Artificial Sequence
  Synthetically generated peptide
  VARIANT (1)..(16): Xaa = Any Amino Acid
CCEWXACNPACXTXGA

SEQ ID NO: 15338 - protein, 17 aa, Artificial Sequence
  Synthetically generated peptide
  VARIANT (1)..(17): Xaa = Any Amino Acid
CCEWXACNPACXTXXGA

SEQ ID NO: 15339 - protein, 17 aa, Artificial Sequence
  Synthetically generated peptide
  VARIANT (1)..(17): Xaa = Any Amino Acid
CCEWXACNPACXTXGXA

SEQ ID NO: 15340 - protein, 16 aa, Artificial Sequence
  Synthetically generated peptide
  VARIANT (1)..(16): Xaa = Any Amino Acid
CCEWXACNPACXTGXA

SEQ ID NO: 15341 - protein, 17 aa, Artificial Sequence
  Synthetically generated peptide
  VARIANT (1)..(17): Xaa = Any Amino Acid
CCEWXACNPACXTGXXA

SEQ ID NO: 15342 - protein, 15 aa, Artificial Sequence
  Synthetically generated peptide
  VARIANT (1)..(15): Xaa = Any Amino Acid
CCEWXACNPACTXGA

SEQ ID NO: 15343 - protein, 16 aa, Artificial Sequence
  Synthetically generated peptide
  VARIANT (1)..(16): Xaa = Any Amino Acid
CCEWXACNPACTXXGA

SEQ ID NO: 15344 - protein, 17 aa, Artificial Sequence
  Synthetically generated peptide
  VARIANT (1)..(17): Xaa = Any Amino Acid
CCEWXACNPACTXXXGA

SEQ ID NO: 15345 - protein, 17 aa, Artificial Sequence
  Synthetically generated peptide
  VARIANT (1)..(17): Xaa = Any Amino Acid
CCEWXACNPACTXXGXA

SEQ ID NO: 15346 - protein, 16 aa, Artificial Sequence
  Synthetically generated peptide
  VARIANT (1)..(16): Xaa = Any Amino Acid
CCEWXACNPACTXGXA

SEQ ID NO: 15347 - protein, 17 aa, Artificial Sequence
  Synthetically generated peptide
  VARIANT (1)..(17): Xaa = Any Amino Acid
CCEWXACNPACTXGXXA

SEQ ID NO: 15348 - protein, 15 aa, Artificial Sequence
  Synthetically generated peptide
  VARIANT (1)..(15): Xaa = Any Amino Acid
CCEWXACNPACTGXA

SEQ ID NO: 15349 - protein, 16 aa, Artificial Sequence
  Synthetically generated peptide
  VARIANT (1)..(16): Xaa = Any Amino Acid
CCEWXACNPACTGXXA

SEQ ID NO: 15350 - protein, 17 aa, Artificial Sequence
  Synthetically generated peptide
  VARIANT (1)..(17): Xaa = Any Amino Acid
CCEWXACNPACTGXXXA

SEQ ID NO: 15351 - protein, 14 aa, Artificial Sequence
  Synthetically generated peptide
  VARIANT (1)..(14): Xaa = Any Amino Acid
CCEWACXNPACTGA

SEQ ID NO: 15352 - protein, 15 aa, Artificial Sequence
  Synthetically generated peptide
  VARIANT (1)..(15): Xaa = Any Amino Acid
CCEWACXXNPACTGA

SEQ ID NO: 15353 - protein, 16 aa, Artificial Sequence
  Synthetically generated peptide
  VARIANT (1)..(16): Xaa = Any Amino Acid
CCEWACXXXNPACTGA

SEQ ID NO: 15354 - protein, 17 aa, Artificial Sequence
  Synthetically generated peptide
  VARIANT (1)..(17): Xaa = Any Amino Acid
CCEWACXXXXNPACTGA

SEQ ID NO: 15355 - protein, 17 aa, Artificial Sequence
  Synthetically generated peptide
  VARIANT (1)..(17): Xaa = Any Amino Acid
CCEWACXXXNXPACTGA

SEQ ID NO: 15356 - protein, 17 aa, Artificial Sequence
  Synthetically generated peptide
  VARIANT (1)..(17): Xaa = Any Amino Acid
CCEWACXXXNPXACTGA

SEQ ID NO: 15357 - protein, 17 aa, Artificial Sequence
  Synthetically generated peptide
  VARIANT (1)..(17): Xaa = Any Amino Acid
CCEWACXXXNPAXCTGA

SEQ ID NO: 15358 - protein, 17 aa, Artificial Sequence
  Synthetically generated peptide
  VARIANT (1)..(17): Xaa = Any Amino Acid
CCEWACXXXNPACXTGA

SEQ ID NO: 15359 - protein, 17 aa, Artificial Sequence
  Synthetically generated peptide
  VARIANT (1)..(17): Xaa = Any Amino Acid
CCEWACXXXNPACTXGA

SEQ ID NO: 15360 - protein, 17 aa, Artificial Sequence
  Synthetically generated peptide
  VARIANT (1)..(17): Xaa = Any Amino Acid
CCEWACXXXNPACTGXA

SEQ ID NO: 15361 - protein, 16 aa, Artificial Sequence
  Synthetically generated peptide
  VARIANT (1)..(16): Xaa = Any Amino Acid
CCEWACXXNXPACTGA

SEQ ID NO: 15362 - protein, 17 aa, Artificial Sequence
  Synthetically generated peptide
  VARIANT (1)..(17): Xaa = Any Amino Acid
CCEWACXXNXXPACTGA

SEQ ID NO: 15363 - protein, 17 aa, Artificial Sequence
  Synthetically generated peptide
  VARIANT (1)..(17): Xaa = Any Amino Acid
CCEWACXXNXPXACTGA

SEQ ID NO: 15364 - protein, 17 aa, Artificial Sequence
  Synthetically generated peptide
  VARIANT (1)..(17): Xaa = Any Amino Acid
CCEWACXXNXPAXCTGA

SEQ ID NO: 15365 - protein, 17 aa, Artificial Sequence
  Synthetically generated peptide
  VARIANT (1)..(17): Xaa = Any Amino Acid
CCEWACXXNXPACXTGA

SEQ ID NO: 15366 - protein, 17 aa, Artificial Sequence
  Synthetically generated peptide
  VARIANT (1)..(17): Xaa = Any Amino Acid
CCEWACXXNXPACTXGA

SEQ ID NO: 15367 - protein, 17 aa, Artificial Sequence
  Synthetically generated peptide
  VARIANT (1)..(17): Xaa = Any Amino Acid
CCEWACXXNXPACTGXA

SEQ ID NO: 15368 - protein, 16 aa, Artificial Sequence
  Synthetically generated peptide
  VARIANT (1)..(16): Xaa = Any Amino Acid
CCEWACXXNPXACTGA

SEQ ID NO: 15369 - protein, 17 aa, Artificial Sequence
  Synthetically generated peptide
  VARIANT (1)..(17): Xaa = Any Amino Acid
CCEWACXXNPXXACTGA

SEQ ID NO: 15370 - protein, 17 aa, Artificial Sequence
  Synthetically generated peptide
  VARIANT (1)..(17): Xaa = Any Amino Acid
CCEWACXXNPXAXCTGA

SEQ ID NO: 15371 - protein, 17 aa, Artificial Sequence
  Synthetically generated peptide
  VARIANT (1)..(17): Xaa = Any Amino Acid
CCEWACXXNPXACXTGA

SEQ ID NO: 15372 - protein, 17 aa, Artificial Sequence
  Synthetically generated peptide
  VARIANT (1)..(17): Xaa = Any Amino Acid
CCEWACXXNPXACTXGA

SEQ ID NO: 15373 - protein, 17 aa, Artificial Sequence
  Synthetically generated peptide
  VARIANT (1)..(17): Xaa = Any Amino Acid
CCEWACXXNPXACTGXA

SEQ ID NO: 15374 - protein, 16 aa, Artificial Sequence
  Synthetically generated peptide
  VARIANT (1)..(16): Xaa = Any Amino Acid
CCEWACXXNPAXCTGA

SEQ ID NO: 15375 - protein, 17 aa, Artificial Sequence
  Synthetically generated peptide
  VARIANT (1)..(17): Xaa = Any Amino Acid
CCEWACXXNPAXXCTGA

SEQ ID NO: 15376 - protein, 17 aa, Artificial Sequence
  Synthetically generated peptide
  VARIANT (1)..(17): Xaa = Any Amino Acid
CCEWACXXNPAXCXTGA

SEQ ID NO: 15377 - protein, 17 aa, Artificial Sequence
  Synthetically generated peptide
  VARIANT (1)..(17): Xaa = Any Amino Acid
CCEWACXXNPAXCTXGA

SEQ ID NO: 15378 - protein, 17 aa, Artificial Sequence
  Synthetically generated peptide
  VARIANT (1)..(17): Xaa = Any Amino Acid
CCEWACXXNPAXCTGXA

SEQ ID NO: 15379 - protein, 16 aa, Artificial Sequence
  Synthetically generated peptide
  VARIANT (1)..(16): Xaa = Any Amino Acid
CCEWACXXNPACXTGA

SEQ ID NO: 15380 - protein, 17 aa, Artificial Sequence
  Synthetically generated peptide
  VARIANT (1)..(17): Xaa = Any Amino Acid
CCEWACXXNPACXXTGA

SEQ ID NO: 15381 - protein, 17 aa, Artificial Sequence
  Synthetically generated peptide
  VARIANT (1)..(17): Xaa = Any Amino Acid
CCEWACXXNPACXTXGA

SEQ ID NO: 15382 - protein, 17 aa, Artificial Sequence
  Synthetically generated peptide
  VARIANT (1)..(17): Xaa = Any Amino Acid
CCEWACXXNPACXTGXA

SEQ ID NO: 15383 - protein, 16 aa, Artificial Sequence
  Synthetically generated peptide
  VARIANT (1)..(16): Xaa = Any Amino Acid
CCEWACXXNPACTXGA

SEQ ID NO: 15384 - protein, 17 aa, Artificial Sequence
  Synthetically generated peptide
  VARIANT (1)..(17): Xaa = Any Amino Acid
CCEWACXXNPACTXXGA

SEQ ID NO: 15385 - protein, 17 aa, Artificial Sequence
  Synthetically generated peptide
  VARIANT (1)..(17): Xaa = Any Amino Acid
CCEWACXXNPACTXGXA

SEQ ID NO: 15386 - protein, 16 aa, Artificial Sequence
  Synthetically generated peptide
  VARIANT (1)..(16): Xaa = Any Amino Acid
CCEWACXXNPACTGXA

SEQ ID NO: 15387 - protein, 17 aa, Artificial Sequence
  Synthetically generated peptide
  VARIANT (1)..(17): Xaa = Any Amino Acid
CCEWACXXNPACTGXXA

SEQ ID NO: 15388 - protein, 15 aa, Artificial Sequence
  Synthetically generated peptide
  VARIANT (1)..(15): Xaa = Any Amino Acid
CCEWACXNXPACTGA

SEQ ID NO: 15389 - protein, 16 aa, Artificial Sequence
  Synthetically generated peptide
  VARIANT (1)..(16): Xaa = Any Amino Acid
CCEWACXNXXPACTGA

SEQ ID NO: 15390 - protein, 17 aa, Artificial Sequence
  Synthetically generated peptide
  VARIANT (1)..(17): Xaa = Any Amino Acid
CCEWACXNXXXPACTGA

SEQ ID NO: 15391 - protein, 17 aa, Artificial Sequence
  Synthetically generated peptide
  VARIANT (1)..(17): Xaa = Any Amino Acid
CCEWACXNXXPXACTGA

SEQ ID NO: 15392 - protein, 17 aa, Artificial Sequence
  Synthetically generated peptide
  VARIANT (1)..(17): Xaa = Any Amino Acid
CCEWACXNXXPAXCTGA

SEQ ID NO: 15393 - protein, 17 aa, Artificial Sequence
  Synthetically generated peptide
  VARIANT (1)..(17): Xaa = Any Amino Acid
CCEWACXNXXPACXTGA

SEQ ID NO: 15394 - protein, 17 aa, Artificial Sequence
  Synthetically generated peptide
  VARIANT (1)..(17): Xaa = Any Amino Acid
CCEWACXNXXPACTXGA

SEQ ID NO: 15395 - protein, 17 aa, Artificial Sequence
  Synthetically generated peptide
  VARIANT (1)..(17): Xaa = Any Amino Acid
CCEWACXNXXPACTGXA

SEQ ID NO: 15396 - protein, 16 aa, Artificial Sequence
  Synthetically generated peptide
  VARIANT (1)..(16): Xaa = Any Amino Acid
CCEWACXNXPXACTGA

SEQ ID NO: 15397 - protein, 17 aa, Artificial Sequence
  Synthetically generated peptide
  VARIANT (1)..(17): Xaa = Any Amino Acid
CCEWACXNXPXXACTGA

SEQ ID NO: 15398 - protein, 17 aa, Artificial Sequence
  Synthetically generated peptide
  VARIANT (1)..(17): Xaa = Any Amino Acid
CCEWACXNXPXAXCTGA

SEQ ID NO: 15399 - protein, 17 aa, Artificial Sequence
  Synthetically generated peptide
  VARIANT (1)..(17): Xaa = Any Amino Acid
CCEWACXNXPXACXTGA

SEQ ID NO: 15400 - protein, 17 aa, Artificial Sequence
  Synthetically generated peptide
  VARIANT (1)..(17): Xaa = Any Amino Acid
CCEWACXNXPXACTXGA

SEQ ID NO: 15401 - protein, 17 aa, Artificial Sequence
  Synthetically generated peptide
  VARIANT (1)..(17): Xaa = Any Amino Acid
CCEWACXNXPXACTGXA

SEQ ID NO: 15402 - protein, 16 aa, Artificial Sequence
  Synthetically generated peptide
  VARIANT (1)..(16): Xaa = Any Amino Acid
CCEWACXNXPAXCTGA

SEQ ID NO: 15403 - protein, 17 aa, Artificial Sequence
  Synthetically generated peptide
  VARIANT (1)..(17): Xaa = Any Amino Acid
CCEWACXNXPAXXCTGA

SEQ ID NO: 15404 - protein, 17 aa, Artificial Sequence
  Synthetically generated peptide
  VARIANT (1)..(17): Xaa = Any Amino Acid
CCEWACXNXPAXCXTGA

SEQ ID NO: 15405 - protein, 17 aa, Artificial Sequence
  Synthetically generated peptide
  VARIANT (1)..(17): Xaa = Any Amino Acid
CCEWACXNXPAXCTXGA

SEQ ID NO: 15406 - protein, 17 aa, Artificial Sequence
  Synthetically generated peptide
  VARIANT (1)..(17): Xaa = Any Amino Acid
CCEWACXNXPAXCTGXA

SEQ ID NO: 15407 - protein, 16 aa, Artificial Sequence
  Synthetically generated peptide
  VARIANT (1)..(16): Xaa = Any Amino Acid
CCEWACXNXPACXTGA

SEQ ID NO: 15408 - protein, 17 aa, Artificial Sequence
  Synthetically generated peptide
  VARIANT (1)..(17): Xaa = Any Amino Acid
CCEWACXNXPACXXTGA

SEQ ID NO: 15409 - protein, 17 aa, Artificial Sequence
  Synthetically generated peptide
  VARIANT (1)..(17): Xaa = Any Amino Acid
CCEWACXNXPACXTXGA

SEQ ID NO: 15410 - protein, 17 aa, Artificial Sequence
  Synthetically generated peptide
  VARIANT (1)..(17): Xaa = Any Amino Acid
CCEWACXNXPACXTGXA

SEQ ID NO: 15411 - protein, 16 aa, Artificial Sequence
  Synthetically generated peptide
  VARIANT (1)..(16): Xaa = Any Amino Acid
CCEWACXNXPACTXGA

SEQ ID NO: 15412 - protein, 17 aa, Artificial Sequence
  Synthetically generated peptide
  VARIANT (1)..(17): Xaa = Any Amino Acid
CCEWACXNXPACTXXGA

SEQ ID NO: 15413 - protein, 17 aa, Artificial Sequence
  Synthetically generated peptide
  VARIANT (1)..(17): Xaa = Any Amino Acid
CCEWACXNXPACTXGXA

SEQ ID NO: 15414 - protein, 16 aa, Artificial Sequence
  Synthetically generated peptide
  VARIANT (1)..(16): Xaa = Any Amino Acid
CCEWACXNXPACTGXA

SEQ ID NO: 15415 - protein, 17 aa, Artificial Sequence
  Synthetically generated peptide
  VARIANT (1)..(17): Xaa = Any Amino Acid
CCEWACXNXPACTGXXA

SEQ ID NO: 15416 - protein, 15 aa, Artificial Sequence
  Synthetically generated peptide
  VARIANT (1)..(15): Xaa = Any Amino Acid
CCEWACXNPXACTGA

SEQ ID NO: 15417 - protein, 16 aa, Artificial Sequence
  Synthetically generated peptide
  VARIANT (1)..(16): Xaa = Any Amino Acid
CCEWACXNPXXACTGA

SEQ ID NO: 15418 - protein, 17 aa, Artificial Sequence
  Synthetically generated peptide
  VARIANT (1)..(17): Xaa = Any Amino Acid
CCEWACXNPXXXACTGA

SEQ ID NO: 15419 - protein, 17 aa, Artificial Sequence
  Synthetically generated peptide
  VARIANT (1)..(17): Xaa = Any Amino Acid
CCEWACXNPXXAXCTGA

SEQ ID NO: 15420 - protein, 17 aa, Artificial Sequence
  Synthetically generated peptide
  VARIANT (1)..(17): Xaa = Any Amino Acid
CCEWACXNPXXACXTGA

SEQ ID NO: 15421 - protein, 17 aa, Artificial Sequence
  Synthetically generated peptide
  VARIANT (1)..(17): Xaa = Any Amino Acid
CCEWACXNPXXACTXGA

SEQ ID NO: 15422 - protein, 17 aa, Artificial Sequence
  Synthetically generated peptide
  VARIANT (1)..(17): Xaa = Any Amino Acid
CCEWACXNPXXACTGXA

SEQ ID NO: 15423 - protein, 16 aa, Artificial Sequence
  Synthetically generated peptide
  VARIANT (1)..(16): Xaa = Any Amino Acid
CCEWACXNPXAXCTGA

SEQ ID NO: 15424 - protein, 17 aa, Artificial Sequence
  Synthetically generated peptide
  VARIANT (1)..(17): Xaa = Any Amino Acid
CCEWACXNPXAXXCTGA

SEQ ID NO: 15425 - protein, 17 aa, Artificial Sequence
  Synthetically generated peptide
  VARIANT (1)..(17): Xaa = Any Amino Acid
CCEWACXNPXAXCXTGA

SEQ ID NO: 15426 - protein, 17 aa, Artificial Sequence
  Synthetically generated peptide
  VARIANT (1)..(17): Xaa = Any Amino Acid
CCEWACXNPXAXCTXGA

SEQ ID NO: 15427 - protein, 17 aa, Artificial Sequence
  Synthetically generated peptide
  VARIANT (1)..(17): Xaa = Any Amino Acid
CCEWACXNPXAXCTGXA

SEQ ID NO: 15428 - protein, 16 aa, Artificial Sequence
  Synthetically generated peptide
  VARIANT (1)..(16): Xaa = Any Amino Acid
CCEWACXNPXACXTGA

SEQ ID NO: 15429 - protein, 17 aa, Artificial Sequence
  Synthetically generated peptide
  VARIANT (1)..(17): Xaa = Any Amino Acid
CCEWACXNPXACXXTGA

SEQ ID NO: 15430 - protein, 17 aa, Artificial Sequence
  Synthetically generated peptide
  VARIANT (1)..(17): Xaa = Any Amino Acid
CCEWACXNPXACXTXGA

SEQ ID NO: 15431 - protein, 17 aa, Artificial Sequence
  Synthetically generated peptide
  VARIANT (1)..(17): Xaa = Any Amino Acid
CCEWACXNPXACXTGXA

SEQ ID NO: 15432 - protein, 16 aa, Artificial Sequence
  Synthetically generated peptide
  VARIANT (1)..(16): Xaa = Any Amino Acid
CCEWACXNPXACTXGA

SEQ ID NO: 15433 - protein, 17 aa, Artificial Sequence
  Synthetically generated peptide
  VARIANT (1)..(17): Xaa = Any Amino Acid
CCEWACXNPXACTXXGA

SEQ ID NO: 15434 - protein, 17 aa, Artificial Sequence
  Synthetically generated peptide
  VARIANT (1)..(17): Xaa = Any Amino Acid
CCEWACXNPXACTXGXA

SEQ ID NO: 15435 - protein, 16 aa, Artificial Sequence
  Synthetically generated peptide
  VARIANT (1)..(16): Xaa = Any Amino Acid
CCEWACXNPXACTGXA

SEQ ID NO: 15436 - protein, 17 aa, Artificial Sequence
  Synthetically generated peptide
  VARIANT (1)..(17): Xaa = Any Amino Acid
CCEWACXNPXACTGXXA

SEQ ID NO: 15437 - protein, 15 aa, Artificial Sequence
  Synthetically generated peptide
  VARIANT (1)..(15): Xaa = Any Amino Acid
CCEWACXNPAXCTGA

SEQ ID NO: 15438 - protein, 16 aa, Artificial Sequence
  Synthetically generated peptide
  VARIANT (1)..(16): Xaa = Any Amino Acid
CCEWACXNPAXXCTGA

SEQ ID NO: 15439 - protein, 17 aa, Artificial Sequence
  Synthetically generated peptide
  VARIANT (1)..(17): Xaa = Any Amino Acid
CCEWACXNPAXXXCTGA

SEQ ID NO: 15440 - protein, 17 aa, Artificial Sequence
  Synthetically generated peptide
  VARIANT (1)..(17): Xaa = Any Amino Acid
CCEWACXNPAXXCXTGA

SEQ ID NO: 15441 - protein, 17 aa, Artificial Sequence
  Synthetically generated peptide
  VARIANT (1)..(17): Xaa = Any Amino Acid
CCEWACXNPAXXCTXGA

SEQ ID NO: 15442 - protein, 17 aa, Artificial Sequence
  Synthetically generated peptide
  VARIANT (1)..(17): Xaa = Any Amino Acid
CCEWACXNPAXXCTGXA

SEQ ID NO: 15443 - protein, 16 aa, Artificial Sequence
  Synthetically generated peptide
  VARIANT (1)..(16): Xaa = Any Amino Acid
CCEWACXNPAXCXTGA

SEQ ID NO: 15444 - protein, 17 aa, Artificial Sequence
  Synthetically generated peptide
  VARIANT (1)..(17): Xaa = Any Amino Acid
CCEWACXNPAXCXXTGA

SEQ ID NO: 15445 - protein, 17 aa, Artificial Sequence
  Synthetically generated peptide
  VARIANT (1)..(17): Xaa = Any Amino Acid
CCEWACXNPAXCXTXGA

SEQ ID NO: 15446 - protein, 17 aa, Artificial Sequence
  Synthetically generated peptide
  VARIANT (1)..(17): Xaa = Any Amino Acid
CCEWACXNPAXCXTGXA

SEQ ID NO: 15447 - protein, 16 aa, Artificial Sequence
  Synthetically generated peptide
  VARIANT (1)..(16): Xaa = Any Amino Acid
CCEWACXNPAXCTXGA

SEQ ID NO: 15448 - protein, 17 aa, Artificial Sequence
  Synthetically generated peptide
  VARIANT (1)..(17): Xaa = Any Amino Acid
CCEWACXNPAXCTXXGA

SEQ ID NO: 15449 - protein, 17 aa, Artificial Sequence
  Synthetically generated peptide
  VARIANT (1)..(17): Xaa = Any Amino Acid
CCEWACXNPAXCTXGXA

SEQ ID NO: 15450 - protein, 16 aa, Artificial Sequence
  Synthetically generated peptide
  VARIANT (1)..(16): Xaa = Any Amino Acid
CCEWACXNPAXCTGXA

SEQ ID NO: 15451 - protein, 17 aa, Artificial Sequence
  Synthetically generated peptide
  VARIANT (1)..(17): Xaa = Any Amino Acid
CCEWACXNPAXCTGXXA

SEQ ID NO: 15452 - protein, 15 aa, Artificial Sequence
  Synthetically generated peptide
  VARIANT (1)..(15): Xaa = Any Amino Acid
CCEWACXNPACXTGA

SEQ ID NO: 15453 - protein, 16 aa, Artificial Sequence
  Synthetically generated peptide
  VARIANT (1)..(16): Xaa = Any Amino Acid
CCEWACXNPACXXTGA

SEQ ID NO: 15454 - protein, 17 aa, Artificial Sequence
  Synthetically generated peptide
  VARIANT (1)..(17): Xaa = Any Amino Acid
CCEWACXNPACXXXTGA

SEQ ID NO: 15455 - protein, 17 aa, Artificial Sequence
  Synthetically generated peptide
  VARIANT (1)..(17): Xaa = Any Amino Acid
CCEWACXNPACXXTXGA

SEQ ID NO: 15456 - protein, 17 aa, Artificial Sequence
  Synthetically generated peptide
  VARIANT (1)..(17): Xaa = Any Amino Acid
CCEWACXNPACXXTGXA

SEQ ID NO: 15457 - protein, 16 aa, Artificial Sequence
  Synthetically generated peptide
  VARIANT (1)..(16): Xaa = Any Amino Acid
CCEWACXNPACXTXGA

SEQ ID NO: 15458 - protein, 17 aa, Artificial Sequence
  Synthetically generated peptide
  VARIANT (1)..(17): Xaa = Any Amino Acid
CCEWACXNPACXTXXGA

SEQ ID NO: 15459 - protein, 17 aa, Artificial Sequence
  Synthetically generated peptide
  VARIANT (1)..(17): Xaa = Any Amino Acid
CCEWACXNPACXTXGXA

SEQ ID NO: 15460 - protein, 16 aa, Artificial Sequence
  Synthetically generated peptide
  VARIANT (1)..(16): Xaa = Any Amino Acid
CCEWACXNPACXTGXA

SEQ ID NO: 15461 - protein, 17 aa, Artificial Sequence
  Synthetically generated peptide
  VARIANT (1)..(17): Xaa = Any Amino Acid
CCEWACXNPACXTGXXA

SEQ ID NO: 15462 - protein, 15 aa, Artificial Sequence
  Synthetically generated peptide
  VARIANT (1)..(15): Xaa = Any Amino Acid
CCEWACXNPACTXGA

SEQ ID NO: 15463 - protein, 16 aa, Artificial Sequence
  Synthetically generated peptide
  VARIANT (1)..(16): Xaa = Any Amino Acid
CCEWACXNPACTXXGA

SEQ ID NO: 15464 - protein, 17 aa, Artificial Sequence
  Synthetically generated peptide
  VARIANT (1)..(17): Xaa = Any Amino Acid
CCEWACXNPACTXXXGA

SEQ ID NO: 15465 - protein, 17 aa, Artificial Sequence
  Synthetically generated peptide
  VARIANT (1)..(17): Xaa = Any Amino Acid
CCEWACXNPACTXXGXA

SEQ ID NO: 15466 - protein, 16 aa, Artificial Sequence
  Synthetically generated peptide
  VARIANT (1)..(16): Xaa = Any Amino Acid
CCEWACXNPACTXGXA

SEQ ID NO: 15467 - protein, 17 aa, Artificial Sequence
  Synthetically generated peptide
  VARIANT (1)..(17): Xaa = Any Amino Acid
CCEWACXNPACTXGXXA

SEQ ID NO: 15468 - protein, 15 aa, Artificial Sequence
  Synthetically generated peptide
  VARIANT (1)..(15): Xaa = Any Amino Acid
CCEWACXNPACTGXA

SEQ ID NO: 15469 - protein, 16 aa, Artificial Sequence
  Synthetically generated peptide
  VARIANT (1)..(16): Xaa = Any Amino Acid
CCEWACXNPACTGXXA

SEQ ID NO: 15470 - protein, 17 aa, Artificial Sequence
  Synthetically generated peptide
  VARIANT (1)..(17): Xaa = Any Amino Acid
CCEWACXNPACTGXXXA

SEQ ID NO: 15471 - protein, 14 aa, Artificial Sequence
  Synthetically generated peptide
  VARIANT (1)..(14): Xaa = Any Amino Acid
CCEWACNXPACTGA

SEQ ID NO: 15472 - protein, 15 aa, Artificial Sequence
  Synthetically generated peptide
  VARIANT (1)..(15): Xaa = Any Amino Acid
CCEWACNXXPACTGA

SEQ ID NO: 15473 - protein, 16 aa, Artificial Sequence
  Synthetically generated peptide
  VARIANT (1)..(16): Xaa = Any Amino Acid
CCEWACNXXXPACTGA

SEQ ID NO: 15474 - protein, 17 aa, Artificial Sequence
  Synthetically generated peptide
  VARIANT (1)..(17): Xaa = Any Amino Acid
CCEWACNXXXXPACTGA

SEQ ID NO: 15475 - protein, 17 aa, Artificial Sequence
  Synthetically generated peptide
  VARIANT (1)..(17): Xaa = Any Amino Acid
CCEWACNXXXPXACTGA

SEQ ID NO: 15476 - protein, 17 aa, Artificial Sequence
  Synthetically generated peptide
  VARIANT (1)..(17): Xaa = Any Amino Acid
CCEWACNXXXPAXCTGA

SEQ ID NO: 15477 - protein, 17 aa, Artificial Sequence
  Synthetically generated peptide
  VARIANT (1)..(17): Xaa = Any Amino Acid
CCEWACNXXXPACXTGA

SEQ ID NO: 15478 - protein, 17 aa, Artificial Sequence
  Synthetically generated peptide
  VARIANT (1)..(17): Xaa = Any Amino Acid
CCEWACNXXXPACTXGA

SEQ ID NO: 15479 - protein, 17 aa, Artificial Sequence
  Synthetically generated peptide
  VARIANT (1)..(17): Xaa = Any Amino Acid
CCEWACNXXXPACTGXA

SEQ ID NO: 15480 - protein, 16 aa, Artificial Sequence
  Synthetically generated peptide
  VARIANT (1)..(16): Xaa = Any Amino Acid
CCEWACNXXPXACTGA

SEQ ID NO: 15481 - protein, 17 aa, Artificial Sequence
  Synthetically generated peptide
  VARIANT (1)..(17): Xaa = Any Amino Acid
CCEWACNXXPXXACTGA

SEQ ID NO: 15482 - protein, 17 aa, Artificial Sequence
  Synthetically generated peptide
  VARIANT (1)..(17): Xaa = Any Amino Acid
CCEWACNXXPXAXCTGA

SEQ ID NO: 15483 - protein, 17 aa, Artificial Sequence
  Synthetically generated peptide
  VARIANT (1)..(17): Xaa = Any Amino Acid
CCEWACNXXPXACXTGA

SEQ ID NO: 15484 - protein, 17 aa, Artificial Sequence
  Synthetically generated peptide
  VARIANT (1)..(17): Xaa = Any Amino Acid
CCEWACNXXPXACTXGA

SEQ ID NO: 15485 - protein, 17 aa, Artificial Sequence
  Synthetically generated peptide
  VARIANT (1)..(17): Xaa = Any Amino Acid
CCEWACNXXPXACTGXA

SEQ ID NO: 15486 - protein, 16 aa, Artificial Sequence
  Synthetically generated peptide
  VARIANT (1)..(16): Xaa = Any Amino Acid
CCEWACNXXPAXCTGA

SEQ ID NO: 15487 - protein, 17 aa, Artificial Sequence
  Synthetically generated peptide
  VARIANT (1)..(17): Xaa = Any Amino Acid
CCEWACNXXPAXXCTGA

SEQ ID NO: 15488 - protein, 17 aa, Artificial Sequence
  Synthetically generated peptide
  VARIANT (1)..(17): Xaa = Any Amino Acid
CCEWACNXXPAXCXTGA

SEQ ID NO: 15489 - protein, 17 aa, Artificial Sequence
  Synthetically generated peptide
  VARIANT (1)..(17): Xaa = Any Amino Acid
CCEWACNXXPAXCTXGA

SEQ ID NO: 15490 - protein, 17 aa, Artificial Sequence
  Synthetically generated peptide
  VARIANT (1)..(17): Xaa = Any Amino Acid
CCEWACNXXPAXCTGXA

SEQ ID NO: 15491 - protein, 16 aa, Artificial Sequence
  Synthetically generated peptide
  VARIANT (1)..(16): Xaa = Any Amino Acid
CCEWACNXXPACXTGA

SEQ ID NO: 15492 - protein, 17 aa, Artificial Sequence
  Synthetically generated peptide
  VARIANT (1)..(17): Xaa = Any Amino Acid
CCEWACNXXPACXXTGA

SEQ ID NO: 15493 - protein, 17 aa, Artificial Sequence
  Synthetically generated peptide
  VARIANT (1)..(17): Xaa = Any Amino Acid
CCEWACNXXPACXTXGA

SEQ ID NO: 15494 - protein, 17 aa, Artificial Sequence
  Synthetically generated peptide
  VARIANT (1)..(17): Xaa = Any Amino Acid
CCEWACNXXPACXTGXA

SEQ ID NO: 15495 - protein, 16 aa, Artificial Sequence
  Synthetically generated peptide
  VARIANT (1)..(16): Xaa = Any Amino Acid
CCEWACNXXPACTXGA

SEQ ID NO: 15496 - protein, 17 aa, Artificial Sequence
  Synthetically generated peptide
  VARIANT (1)..(17): Xaa = Any Amino Acid
CCEWACNXXPACTXXGA

SEQ ID NO: 15497 - protein, 17 aa, Artificial Sequence
  Synthetically generated peptide
  VARIANT (1)..(17): Xaa = Any Amino Acid
CCEWACNXXPACTXGXA

SEQ ID NO: 15498 - protein, 16 aa, Artificial Sequence
  Synthetically generated peptide
  VARIANT (1)..(16): Xaa = Any Amino Acid
CCEWACNXXPACTGXA

SEQ ID NO: 15499 - protein, 17 aa, Artificial Sequence
  Synthetically generated peptide
  VARIANT (1)..(17): Xaa = Any Amino Acid
CCEWACNXXPACTGXXA

SEQ ID NO: 15500 - protein, 15 aa, Artificial Sequence
  Synthetically generated peptide
  VARIANT (1)..(15): Xaa = Any Amino Acid
CCEWACNXPXACTGA

SEQ ID NO: 15501 - protein, 16 aa, Artificial Sequence
  Synthetically generated peptide
  VARIANT (1)..(16): Xaa = Any Amino Acid
CCEWACNXPXXACTGA

SEQ ID NO: 15502 - protein, 17 aa, Artificial Sequence
  Synthetically generated peptide
  VARIANT (1)..(17): Xaa = Any Amino Acid
CCEWACNXPXXXACTGA

SEQ ID NO: 15503 - protein, 17 aa, Artificial Sequence
  Synthetically generated peptide
  VARIANT (1)..(17): Xaa = Any Amino Acid
CCEWACNXPXXAXCTGA

SEQ ID NO: 15504 - protein, 17 aa, Artificial Sequence
  Synthetically generated peptide
  VARIANT (1)..(17): Xaa = Any Amino Acid
CCEWACNXPXXACXTGA

SEQ ID NO: 15505 - protein, 17 aa, Artificial Sequence
  Synthetically generated peptide
  VARIANT (1)..(17): Xaa = Any Amino Acid
CCEWACNXPXXACTXGA

SEQ ID NO: 15506 - protein, 17 aa, Artificial Sequence
  Synthetically generated peptide
  VARIANT (1)..(17): Xaa = Any Amino Acid
CCEWACNXPXXACTGXA

SEQ ID NO: 15507 - protein, 16 aa, Artificial Sequence
  Synthetically generated peptide
  VARIANT (1)..(16): Xaa = Any Amino Acid
CCEWACNXPXAXCTGA

SEQ ID NO: 15508 - protein, 17 aa, Artificial Sequence
  Synthetically generated peptide
  VARIANT (1)..(17): Xaa = Any Amino Acid
CCEWACNXPXAXXCTGA

SEQ ID NO: 15509 - protein, 17 aa, Artificial Sequence
  Synthetically generated peptide
  VARIANT (1)..(17): Xaa = Any Amino Acid
CCEWACNXPXAXCXTGA

SEQ ID NO: 15510 - protein, 17 aa, Artificial Sequence
  Synthetically generated peptide
  VARIANT (1)..(17): Xaa = Any Amino Acid
CCEWACNXPXAXCTXGA

SEQ ID NO: 15511 - protein, 17 aa, Artificial Sequence
  Synthetically generated peptide
  VARIANT (1)..(17): Xaa = Any Amino Acid
CCEWACNXPXAXCTGXA

SEQ ID NO: 15512 - protein, 16 aa, Artificial Sequence
  Synthetically generated peptide
  VARIANT (1)..(16): Xaa = Any Amino Acid
CCEWACNXPXACXTGA

SEQ ID NO: 15513 - protein, 17 aa, Artificial Sequence
  Synthetically generated peptide
  VARIANT (1)..(17): Xaa = Any Amino Acid
CCEWACNXPXACXXTGA

SEQ ID NO: 15514 - protein, 17 aa, Artificial Sequence
  Synthetically generated peptide
  VARIANT (1)..(17): Xaa = Any Amino Acid
CCEWACNXPXACXTXGA

SEQ ID NO: 15515 - protein, 17 aa, Artificial Sequence
  Synthetically generated peptide
  VARIANT (1)..(17): Xaa = Any Amino Acid
CCEWACNXPXACXTGXA

SEQ ID NO: 15516 - protein, 16 aa, Artificial Sequence
  Synthetically generated peptide
  VARIANT (1)..(16): Xaa = Any Amino Acid
CCEWACNXPXACTXGA

SEQ ID NO: 15517 - protein, 17 aa, Artificial Sequence
  Synthetically generated peptide
  VARIANT (1)..(17): Xaa = Any Amino Acid
CCEWACNXPXACTXXGA

SEQ ID NO: 15518 - protein, 17 aa, Artificial Sequence
  Synthetically generated peptide
  VARIANT (1)..(17): Xaa = Any Amino Acid
CCEWACNXPXACTXGXA

SEQ ID NO: 15519 - protein, 16 aa, Artificial Sequence
  Synthetically generated peptide
  VARIANT (1)..(16): Xaa = Any Amino Acid
CCEWACNXPXACTGXA

SEQ ID NO: 15520 - protein, 17 aa, Artificial Sequence
  Synthetically generated peptide
  VARIANT (1)..(17): Xaa = Any Amino Acid
CCEWACNXPXACTGXXA

SEQ ID NO: 15521 - protein, 15 aa, Artificial Sequence
  Synthetically generated peptide
  VARIANT (1)..(15): Xaa = Any Amino Acid
CCEWACNXPAXCTGA

SEQ ID NO: 15522 - protein, 16 aa, Artificial Sequence
  Synthetically generated peptide
  VARIANT (1)..(16): Xaa = Any Amino Acid
CCEWACNXPAXXCTGA

SEQ ID NO: 15523 - protein, 17 aa, Artificial Sequence
  Synthetically generated peptide
  VARIANT (1)..(17): Xaa = Any Amino Acid
CCEWACNXPAXXXCTGA

SEQ ID NO: 15524 - protein, 17 aa, Artificial Sequence
  Synthetically generated peptide
  VARIANT (1)..(17): Xaa = Any Amino Acid
CCEWACNXPAXXCXTGA

SEQ ID NO: 15525 - protein, 17 aa, Artificial Sequence
  Synthetically generated peptide
  VARIANT (1)..(17): Xaa = Any Amino Acid
CCEWACNXPAXXCTXGA

SEQ ID NO: 15526 - protein, 17 aa, Artificial Sequence
  Synthetically generated peptide
  VARIANT (1)..(17): Xaa = Any Amino Acid
CCEWACNXPAXXCTGXA

SEQ ID NO: 15527 - protein, 16 aa, Artificial Sequence
  Synthetically generated peptide
  VARIANT (1)..(16): Xaa = Any Amino Acid
CCEWACNXPAXCXTGA

SEQ ID NO: 15528 - protein, 17 aa, Artificial Sequence
  Synthetically generated peptide
  VARIANT (1)..(17): Xaa = Any Amino Acid
CCEWACNXPAXCXXTGA

SEQ ID NO: 15529 - protein, 17 aa, Artificial Sequence
  Synthetically generated peptide
  VARIANT (1)..(17): Xaa = Any Amino Acid
CCEWACNXPAXCXTXGA

SEQ ID NO: 15530 - protein, 17 aa, Artificial Sequence
  Synthetically generated peptide
  VARIANT (1)..(17): Xaa = Any Amino Acid
CCEWACNXPAXCXTGXA

SEQ ID NO: 15531 - protein, 16 aa, Artificial Sequence
  Synthetically generated peptide
  VARIANT (1)..(16): Xaa = Any Amino Acid
CCEWACNXPAXCTXGA

SEQ ID NO: 15532 - protein, 17 aa, Artificial Sequence
  Synthetically generated peptide
  VARIANT (1)..(17): Xaa = Any Amino Acid
CCEWACNXPAXCTXXGA

SEQ ID NO: 15533 - protein, 17 aa, Artificial Sequence
  Synthetically generated peptide
  VARIANT (1)..(17): Xaa = Any Amino Acid
CCEWACNXPAXCTXGXA

SEQ ID NO: 15534 - protein, 16 aa, Artificial Sequence
  Synthetically generated peptide
  VARIANT (1)..(16): Xaa = Any Amino Acid
CCEWACNXPAXCTGXA

SEQ ID NO: 15535 - protein, 17 aa, Artificial Sequence
  Synthetically generated peptide
  VARIANT (1)..(17): Xaa = Any Amino Acid
CCEWACNXPAXCTGXXA

SEQ ID NO: 15536 - protein, 15 aa, Artificial Sequence
  Synthetically generated peptide
  VARIANT (1)..(15): Xaa = Any Amino Acid
CCEWACNXPACXTGA

SEQ ID NO: 15537 - protein, 16 aa, Artificial Sequence
  Synthetically generated peptide
  VARIANT (1)..(16): Xaa = Any Amino Acid
CCEWACNXPACXXTGA

SEQ ID NO: 15538 - protein, 17 aa, Artificial Sequence
  Synthetically generated peptide
  VARIANT (1)..(17): Xaa = Any Amino Acid
CCEWACNXPACXXXTGA

SEQ ID NO: 15539 - protein, 17 aa, Artificial Sequence
  Synthetically generated peptide
  VARIANT (1)..(17): Xaa = Any Amino Acid
CCEWACNXPACXXTXGA

SEQ ID NO: 15540 - protein, 17 aa, Artificial Sequence
  Synthetically generated peptide
  VARIANT (1)..(17): Xaa = Any Amino Acid
CCEWACNXPACXXTGXA

SEQ ID NO: 15541 - protein, 16 aa, Artificial Sequence
  Synthetically generated peptide
  VARIANT (1)..(16): Xaa = Any Amino Acid
CCEWACNXPACXTXGA

SEQ ID NO: 15542 - protein, 17 aa, Artificial Sequence
  Synthetically generated peptide
  VARIANT (1)..(17): Xaa = Any Amino Acid
CCEWACNXPACXTXXGA

SEQ ID NO: 15543 - protein, 17 aa, Artificial Sequence
  Synthetically generated peptide
  VARIANT (1)..(17): Xaa = Any Amino Acid
CCEWACNXPACXTXGXA

SEQ ID NO: 15544 - protein, 16 aa, Artificial Sequence
  Synthetically generated peptide
  VARIANT (1)..(16): Xaa = Any Amino Acid
CCEWACNXPACXTGXA

SEQ ID NO: 15545 - protein, 17 aa, Artificial Sequence
  Synthetically generated peptide
  VARIANT (1)..(17): Xaa = Any Amino Acid
CCEWACNXPACXTGXXA

SEQ ID NO: 15546 - protein, 15 aa, Artificial Sequence
  Synthetically generated peptide
  VARIANT (1)..(15): Xaa = Any Amino Acid
CCEWACNXPACTXGA

SEQ ID NO: 15547 - protein, 16 aa, Artificial Sequence
  Synthetically generated peptide
  VARIANT (1)..(16): Xaa = Any Amino Acid
CCEWACNXPACTXXGA

SEQ ID NO: 15548 - protein, 17 aa, Artificial Sequence
  Synthetically generated peptide
  VARIANT (1)..(17): Xaa = Any Amino Acid
CCEWACNXPACTXXXGA

SEQ ID NO: 15549 - protein, 17 aa, Artificial Sequence
  Synthetically generated peptide
  VARIANT (1)..(17): Xaa = Any Amino Acid
CCEWACNXPACTXXGXA

SEQ ID NO: 15550 - protein, 16 aa, Artificial Sequence
  Synthetically generated peptide
  VARIANT (1)..(16): Xaa = Any Amino Acid
CCEWACNXPACTXGXA

SEQ ID NO: 15551 - protein, 17 aa, Artificial Sequence
  Synthetically generated peptide
  VARIANT (1)..(17): Xaa = Any Amino Acid
CCEWACNXPACTXGXXA

SEQ ID NO: 15552 - protein, 15 aa, Artificial Sequence
  Synthetically generated peptide
  VARIANT (1)..(15): Xaa = Any Amino Acid
CCEWACNXPACTGXA

SEQ ID NO: 15553 - protein, 16 aa, Artificial Sequence
  Synthetically generated peptide
  VARIANT (1)..(16): Xaa = Any Amino Acid
CCEWACNXPACTGXXA

SEQ ID NO: 15554 - protein, 17 aa, Artificial Sequence
  Synthetically generated peptide
  VARIANT (1)..(17): Xaa = Any Amino Acid
CCEWACNXPACTGXXXA

SEQ ID NO: 15555 - protein, 14 aa, Artificial Sequence
  Synthetically generated peptide
  VARIANT (1)..(14): Xaa = Any Amino Acid
CCEWACNPXACTGA

SEQ ID NO: 15556 - protein, 15 aa, Artificial Sequence
  Synthetically generated peptide
  VARIANT (1)..(15): Xaa = Any Amino Acid
CCEWACNPXXACTGA

SEQ ID NO: 15557 - protein, 16 aa, Artificial Sequence
  Synthetically generated peptide
  VARIANT (1)..(16): Xaa = Any Amino Acid
CCEWACNPXXXACTGA

SEQ ID NO: 15558 - protein, 17 aa, Artificial Sequence
  Synthetically generated peptide
  VARIANT (1)..(17): Xaa = Any Amino Acid
CCEWACNPXXXXACTGA

SEQ ID NO: 15559 - protein, 17 aa, Artificial Sequence
  Synthetically generated peptide
  VARIANT (1)..(17): Xaa = Any Amino Acid
CCEWACNPXXXAXCTGA

SEQ ID NO: 15560 - protein, 17 aa, Artificial Sequence
  Synthetically generated peptide
  VARIANT (1)..(17): Xaa = Any Amino Acid
CCEWACNPXXXACXTGA

SEQ ID NO: 15561 - protein, 17 aa, Artificial Sequence
  Synthetically generated peptide
  VARIANT (1)..(17): Xaa = Any Amino Acid
CCEWACNPXXXACTXGA

SEQ ID NO: 15562 - protein, 17 aa, Artificial Sequence
  Synthetically generated peptide
  VARIANT (1)..(17): Xaa = Any Amino Acid
CCEWACNPXXXACTGXA

SEQ ID NO: 15563 - protein, 16 aa, Artificial Sequence
  Synthetically generated peptide
  VARIANT (1)..(16): Xaa = Any Amino Acid
CCEWACNPXXAXCTGA

SEQ ID NO: 15564 - protein, 17 aa, Artificial Sequence
  Synthetically generated peptide
  VARIANT (1)..(17): Xaa = Any Amino Acid
CCEWACNPXXAXXCTGA

SEQ ID NO: 15565 - protein, 17 aa, Artificial Sequence
  Synthetically generated peptide
  VARIANT (1)..(17): Xaa = Any Amino Acid
CCEWACNPXXAXCXTGA

SEQ ID NO: 15566 - protein, 17 aa, Artificial Sequence
  Synthetically generated peptide
  VARIANT (1)..(17): Xaa = Any Amino Acid
CCEWACNPXXAXCTXGA

SEQ ID NO: 15567 - protein, 17 aa, Artificial Sequence
  Synthetically generated peptide
  VARIANT (1)..(17): Xaa = Any Amino Acid
CCEWACNPXXAXCTGXA

SEQ ID NO: 15568 - protein, 16 aa, Artificial Sequence
  Synthetically generated peptide
  VARIANT (1)..(16): Xaa = Any Amino Acid
CCEWACNPXXACXTGA

SEQ ID NO: 15569 - protein, 17 aa, Artificial Sequence
  Synthetically generated peptide
  VARIANT (1)..(17): Xaa = Any Amino Acid
CCEWACNPXXACXXTGA

SEQ ID NO: 15570 - protein, 17 aa, Artificial Sequence
  Synthetically generated peptide
  VARIANT (1)..(17): Xaa = Any Amino Acid
CCEWACNPXXACXTXGA

SEQ ID NO: 15571 - protein, 17 aa, Artificial Sequence
  Synthetically generated peptide
  VARIANT (1)..(17): Xaa = Any Amino Acid
CCEWACNPXXACXTGXA

SEQ ID NO: 15572 - protein, 16 aa, Artificial Sequence
  Synthetically generated peptide
  VARIANT (1)..(16): Xaa = Any Amino Acid
CCEWACNPXXACTXGA

SEQ ID NO: 15573 - protein, 17 aa, Artificial Sequence
  Synthetically generated peptide
  VARIANT (1)..(17): Xaa = Any Amino Acid
CCEWACNPXXACTXXGA

SEQ ID NO: 15574 - protein, 17 aa, Artificial Sequence
  Synthetically generated peptide
  VARIANT (1)..(17): Xaa = Any Amino Acid
CCEWACNPXXACTXGXA

SEQ ID NO: 15575 - protein, 16 aa, Artificial Sequence
  Synthetically generated peptide
  VARIANT (1)..(16): Xaa = Any Amino Acid
CCEWACNPXXACTGXA

SEQ ID NO: 15576 - protein, 17 aa, Artificial Sequence
  Synthetically generated peptide
  VARIANT (1)..(17): Xaa = Any Amino Acid
CCEWACNPXXACTGXXA

SEQ ID NO: 15577 - protein, 15 aa, Artificial Sequence
  Synthetically generated peptide
  VARIANT (1)..(15): Xaa = Any Amino Acid
CCEWACNPXAXCTGA

SEQ ID NO: 15578 - protein, 16 aa, Artificial Sequence
  Synthetically generated peptide
  VARIANT (1)..(16): Xaa = Any Amino Acid
CCEWACNPXAXXCTGA

SEQ ID NO: 15579 - protein, 17 aa, Artificial Sequence
  Synthetically generated peptide
  VARIANT (1)..(17): Xaa = Any Amino Acid
CCEWACNPXAXXXCTGA

SEQ ID NO: 15580 - protein, 17 aa, Artificial Sequence
  Synthetically generated peptide
  VARIANT (1)..(17): Xaa = Any Amino Acid
CCEWACNPXAXXCXTGA

SEQ ID NO: 15581 - protein, 17 aa, Artificial Sequence
  Synthetically generated peptide
  VARIANT (1)..(17): Xaa = Any Amino Acid
CCEWACNPXAXXCTXGA

SEQ ID NO: 15582 - protein, 17 aa, Artificial Sequence
  Synthetically generated peptide
  VARIANT (1)..(17): Xaa = Any Amino Acid
CCEWACNPXAXXCTGXA

SEQ ID NO: 15583 - protein, 16 aa, Artificial Sequence
  Synthetically generated peptide
  VARIANT (1)..(16): Xaa = Any Amino Acid
CCEWACNPXAXCXTGA

SEQ ID NO: 15584 - protein, 17 aa, Artificial Sequence
  Synthetically generated peptide
  VARIANT (1)..(17): Xaa = Any Amino Acid
CCEWACNPXAXCXXTGA

SEQ ID NO: 15585 - protein, 17 aa, Artificial Sequence
  Synthetically generated peptide
  VARIANT (1)..(17): Xaa = Any Amino Acid
CCEWACNPXAXCXTXGA

SEQ ID NO: 15586 - protein, 17 aa, Artificial Sequence
  Synthetically generated peptide
  VARIANT (1)..(17): Xaa = Any Amino Acid
CCEWACNPXAXCXTGXA

SEQ ID NO: 15587 - protein, 16 aa, Artificial Sequence
  Synthetically generated peptide
  VARIANT (1)..(16): Xaa = Any Amino Acid
CCEWACNPXAXCTXGA

SEQ ID NO: 15588 - protein, 17 aa, Artificial Sequence
  Synthetically generated peptide
  VARIANT (1)..(17): Xaa = Any Amino Acid
CCEWACNPXAXCTXXGA

SEQ ID NO: 15589 - protein, 17 aa, Artificial Sequence
  Synthetically generated peptide
  VARIANT (1)..(17): Xaa = Any Amino Acid
CCEWACNPXAXCTXGXA

SEQ ID NO: 15590 - protein, 16 aa, Artificial Sequence
  Synthetically generated peptide
  VARIANT (1)..(16): Xaa = Any Amino Acid
CCEWACNPXAXCTGXA

SEQ ID NO: 15591 - protein, 17 aa, Artificial Sequence
  Synthetically generated peptide
  VARIANT (1)..(17): Xaa = Any Amino Acid
CCEWACNPXAXCTGXXA

SEQ ID NO: 15592 - protein, 15 aa, Artificial Sequence
  Synthetically generated peptide
  VARIANT (1)..(15): Xaa = Any Amino Acid
CCEWACNPXACXTGA

SEQ ID NO: 15593 - protein, 16 aa, Artificial Sequence
  Synthetically generated peptide
  VARIANT (1)..(16): Xaa = Any Amino Acid
CCEWACNPXACXXTGA

SEQ ID NO: 15594 - protein, 17 aa, Artificial Sequence
  Synthetically generated peptide
  VARIANT (1)..(17): Xaa = Any Amino Acid
CCEWACNPXACXXXTGA

SEQ ID NO: 15595 - protein, 17 aa, Artificial Sequence
  Synthetically generated peptide
  VARIANT (1)..(17): Xaa = Any Amino Acid
CCEWACNPXACXXTXGA

SEQ ID NO: 15596 - protein, 17 aa, Artificial Sequence
  Synthetically generated peptide
  VARIANT (1)..(17): Xaa = Any Amino Acid
CCEWACNPXACXXTGXA

SEQ ID NO: 15597 - protein, 16 aa, Artificial Sequence
  Synthetically generated peptide
  VARIANT (1)..(16): Xaa = Any Amino Acid
CCEWACNPXACXTXGA

SEQ ID NO: 15598 - protein, 17 aa, Artificial Sequence
  Synthetically generated peptide
  VARIANT (1)..(17): Xaa = Any Amino Acid
CCEWACNPXACXTXXGA

SEQ ID NO: 15599 - protein, 17 aa, Artificial Sequence
  Synthetically generated peptide
  VARIANT (1)..(17): Xaa = Any Amino Acid
CCEWACNPXACXTXGXA

SEQ ID NO: 15600 - protein, 16 aa, Artificial Sequence
  Synthetically generated peptide
  VARIANT (1)..(16): Xaa = Any Amino Acid
CCEWACNPXACXTGXA

SEQ ID NO: 15601 - protein, 17 aa, Artificial Sequence
  Synthetically generated peptide
  VARIANT (1)..(17): Xaa = Any Amino Acid
CCEWACNPXACXTGXXA

SEQ ID NO: 15602 - protein, 15 aa, Artificial Sequence
  Synthetically generated peptide
  VARIANT (1)..(15): Xaa = Any Amino Acid
CCEWACNPXACTXGA

SEQ ID NO: 15603 - protein, 16 aa, Artificial Sequence
  Synthetically generated peptide
  VARIANT (1)..(16): Xaa = Any Amino Acid
CCEWACNPXACTXXGA

SEQ ID NO: 15604 - protein, 17 aa, Artificial Sequence
  Synthetically generated peptide
  VARIANT (1)..(17): Xaa = Any Amino Acid
CCEWACNPXACTXXXGA

SEQ ID NO: 15605 - protein, 17 aa, Artificial Sequence
  Synthetically generated peptide
  VARIANT (1)..(17): Xaa = Any Amino Acid
CCEWACNPXACTXXGXA

SEQ ID NO: 15606 - protein, 16 aa, Artificial Sequence
  Synthetically generated peptide
  VARIANT (1)..(16): Xaa = Any Amino Acid
CCEWACNPXACTXGXA

SEQ ID NO: 15607 - protein, 17 aa, Artificial Sequence
  Synthetically generated peptide
  VARIANT (1)..(17): Xaa = Any Amino Acid
CCEWACNPXACTXGXXA

SEQ ID NO: 15608 - protein, 15 aa, Artificial Sequence
  Synthetically generated peptide
  VARIANT (1)..(15): Xaa = Any Amino Acid
CCEWACNPXACTGXA

SEQ ID NO: 15609 - protein, 16 aa, Artificial Sequence
  Synthetically generated peptide
  VARIANT (1)..(16): Xaa = Any Amino Acid
CCEWACNPXACTGXXA

SEQ ID NO: 15610 - protein, 17 aa, Artificial Sequence
  Synthetically generated peptide
  VARIANT (1)..(17): Xaa = Any Amino Acid
CCEWACNPXACTGXXXA

SEQ ID NO: 15611 - protein, 14 aa, Artificial Sequence
  Synthetically generated peptide
  VARIANT (1)..(14): Xaa = Any Amino Acid
CCEWACNPAXCTGA

SEQ ID NO: 15612 - protein, 15 aa, Artificial Sequence
  Synthetically generated peptide
  VARIANT (1)..(15): Xaa = Any Amino Acid
CCEWACNPAXXCTGA

SEQ ID NO: 15613 - protein, 16 aa, Artificial Sequence
  Synthetically generated peptide
  VARIANT (1)..(16): Xaa = Any Amino Acid
CCEWACNPAXXXCTGA

SEQ ID NO: 15614 - protein, 17 aa, Artificial Sequence
  Synthetically generated peptide
  VARIANT (1)..(17): Xaa = Any Amino Acid
CCEWACNPAXXXXCTGA

SEQ ID NO: 15615 - protein, 17 aa, Artificial Sequence
  Synthetically generated peptide
  VARIANT (1)..(17): Xaa = Any Amino Acid
CCEWACNPAXXXCXTGA

SEQ ID NO: 15616 - protein, 17 aa, Artificial Sequence
  Synthetically generated peptide
  VARIANT (1)..(17): Xaa = Any Amino Acid
CCEWACNPAXXXCTXGA

SEQ ID NO: 15617 - protein, 17 aa, Artificial Sequence
  Synthetically generated peptide
  VARIANT (1)..(17): Xaa = Any Amino Acid
CCEWACNPAXXXCTGXA

SEQ ID NO: 15618 - protein, 16 aa, Artificial Sequence
  Synthetically generated peptide
  VARIANT (1)..(16): Xaa = Any Amino Acid
CCEWACNPAXXCXTGA

SEQ ID NO: 15619 - protein, 17 aa, Artificial Sequence
  Synthetically generated peptide
  VARIANT (1)..(17): Xaa = Any Amino Acid
CCEWACNPAXXCXXTGA

SEQ ID NO: 15620 - protein, 17 aa, Artificial Sequence
  Synthetically generated peptide
  VARIANT (1)..(17): Xaa = Any Amino Acid
CCEWACNPAXXCXTXGA

SEQ ID NO: 15621 - protein, 17 aa, Artificial Sequence
  Synthetically generated peptide
  VARIANT (1)..(17): Xaa = Any Amino Acid
CCEWACNPAXXCXTGXA

SEQ ID NO: 15622 - protein, 16 aa, Artificial Sequence
  Synthetically generated peptide
  VARIANT (1)..(16): Xaa = Any Amino Acid
CCEWACNPAXXCTXGA

SEQ ID NO: 15623 - protein, 17 aa, Artificial Sequence
  Synthetically generated peptide
  VARIANT (1)..(17): Xaa = Any Amino Acid
CCEWACNPAXXCTXXGA

SEQ ID NO: 15624 - protein, 17 aa, Artificial Sequence
  Synthetically generated peptide
  VARIANT (1)..(17): Xaa = Any Amino Acid
CCEWACNPAXXCTXGXA

SEQ ID NO: 15625 - protein, 16 aa, Artificial Sequence
  Synthetically generated peptide
  VARIANT (1)..(16): Xaa = Any Amino Acid
CCEWACNPAXXCTGXA

SEQ ID NO: 15626 - protein, 17 aa, Artificial Sequence
  Synthetically generated peptide
  VARIANT (1)..(17): Xaa = Any Amino Acid
CCEWACNPAXXCTGXXA

SEQ ID NO: 15627 - protein, 15 aa, Artificial Sequence
  Synthetically generated peptide
  VARIANT (1)..(15): Xaa = Any Amino Acid
CCEWACNPAXCXTGA

SEQ ID NO: 15628 - protein, 16 aa, Artificial Sequence
  Synthetically generated peptide
  VARIANT (1)..(16): Xaa = Any Amino Acid
CCEWACNPAXCXXTGA

SEQ ID NO: 15629 - protein, 17 aa, Artificial Sequence
  Synthetically generated peptide
  VARIANT (1)..(17): Xaa = Any Amino Acid
CCEWACNPAXCXXXTGA

SEQ ID NO: 15630 - protein, 17 aa, Artificial Sequence
  Synthetically generated peptide
  VARIANT (1)..(17): Xaa = Any Amino Acid
CCEWACNPAXCXXTXGA

SEQ ID NO: 15631 - protein, 17 aa, Artificial Sequence
  Synthetically generated peptide
  VARIANT (1)..(17): Xaa = Any Amino Acid
CCEWACNPAXCXXTGXA

SEQ ID NO: 15632 - protein, 16 aa, Artificial Sequence
  Synthetically generated peptide
  VARIANT (1)..(16): Xaa = Any Amino Acid
CCEWACNPAXCXTXGA

SEQ ID NO: 15633 - protein, 17 aa, Artificial Sequence
  Synthetically generated peptide
  VARIANT (1)..(17): Xaa = Any Amino Acid
CCEWACNPAXCXTXXGA

SEQ ID NO: 15634 - protein, 17 aa, Artificial Sequence
  Synthetically generated peptide
  VARIANT (1)..(17): Xaa = Any Amino Acid
CCEWACNPAXCXTXGXA

SEQ ID NO: 15635 - protein, 16 aa, Artificial Sequence
  Synthetically generated peptide
  VARIANT (1)..(16): Xaa = Any Amino Acid
CCEWACNPAXCXTGXA

SEQ ID NO: 15636 - protein, 17 aa, Artificial Sequence
  Synthetically generated peptide
  VARIANT (1)..(17): Xaa = Any Amino Acid
CCEWACNPAXCXTGXXA

SEQ ID NO: 15637 - protein, 15 aa, Artificial Sequence
  Synthetically generated peptide
  VARIANT (1)..(15): Xaa = Any Amino Acid
CCEWACNPAXCTXGA

SEQ ID NO: 15638 - protein, 16 aa, Artificial Sequence
  Synthetically generated peptide
  VARIANT (1)..(16): Xaa = Any Amino Acid
CCEWACNPAXCTXXGA

SEQ ID NO: 15639 - protein, 17 aa, Artificial Sequence
  Synthetically generated peptide
  VARIANT (1)..(17): Xaa = Any Amino Acid
CCEWACNPAXCTXXXGA

SEQ ID NO: 15640 - protein, 17 aa, Artificial Sequence
  Synthetically generated peptide
  VARIANT (1)..(17): Xaa = Any Amino Acid
CCEWACNPAXCTXXGXA

SEQ ID NO: 15641 - protein, 16 aa, Artificial Sequence
  Synthetically generated peptide
  VARIANT (1)..(16): Xaa = Any Amino Acid
CCEWACNPAXCTXGXA

SEQ ID NO: 15642 - protein, 17 aa, Artificial Sequence
  Synthetically generated peptide
  VARIANT (1)..(17): Xaa = Any Amino Acid
CCEWACNPAXCTXGXXA

SEQ ID NO: 15643 - protein, 15 aa, Artificial Sequence
  Synthetically generated peptide
  VARIANT (1)..(15): Xaa = Any Amino Acid
CCEWACNPAXCTGXA

SEQ ID NO: 15644 - protein, 16 aa, Artificial Sequence
  Synthetically generated peptide
  VARIANT (1)..(16): Xaa = Any Amino Acid
CCEWACNPAXCTGXXA

SEQ ID NO: 15645 - protein, 17 aa, Artificial Sequence
  Synthetically generated peptide
  VARIANT (1)..(17): Xaa = Any Amino Acid
CCEWACNPAXCTGXXXA

SEQ ID NO: 15646 - protein, 14 aa, Artificial Sequence
  Synthetically generated peptide
  VARIANT (1)..(14): Xaa = Any Amino Acid
CCEWACNPACXTGA

SEQ ID NO: 15647 - protein, 15 aa, Artificial Sequence
  Synthetically generated peptide
  VARIANT (1)..(15): Xaa = Any Amino Acid
CCEWACNPACXXTGA

SEQ ID NO: 15648 - protein, 16 aa, Artificial Sequence
  Synthetically generated peptide
  VARIANT (1)..(16): Xaa = Any Amino Acid
CCEWACNPACXXXTGA

SEQ ID NO: 15649 - protein, 17 aa, Artificial Sequence
  Synthetically generated peptide
  VARIANT (1)..(17): Xaa = Any Amino Acid
CCEWACNPACXXXXTGA

SEQ ID NO: 15650 - protein, 17 aa, Artificial Sequence
  Synthetically generated peptide
  VARIANT (1)..(17): Xaa = Any Amino Acid
CCEWACNPACXXXTXGA

SEQ ID NO: 15651 - protein, 17 aa, Artificial Sequence
  Synthetically generated peptide
  VARIANT (1)..(17): Xaa = Any Amino Acid
CCEWACNPACXXXTGXA

SEQ ID NO: 15652 - protein, 16 aa, Artificial Sequence
  Synthetically generated peptide
  VARIANT (1)..(16): Xaa = Any Amino Acid
CCEWACNPACXXTXGA

SEQ ID NO: 15653 - protein, 17 aa, Artificial Sequence
  Synthetically generated peptide
  VARIANT (1)..(17): Xaa = Any Amino Acid
CCEWACNPACXXTXXGA

SEQ ID NO: 15654 - protein, 17 aa, Artificial Sequence
  Synthetically generated peptide
  VARIANT (1)..(17): Xaa = Any Amino Acid
CCEWACNPACXXTXGXA

SEQ ID NO: 15655 - protein, 16 aa, Artificial Sequence
  Synthetically generated peptide
  VARIANT (1)..(16): Xaa = Any Amino Acid
CCEWACNPACXXTGXA

SEQ ID NO: 15656 - protein, 17 aa, Artificial Sequence
  Synthetically generated peptide
  VARIANT (1)..(17): Xaa = Any Amino Acid
CCEWACNPACXXTGXXA

SEQ ID NO: 15657 - protein, 15 aa, Artificial Sequence
  Synthetically generated peptide
  VARIANT (1)..(15): Xaa = Any Amino Acid
CCEWACNPACXTXGA

SEQ ID NO: 15658 - protein, 16 aa, Artificial Sequence
  Synthetically generated peptide
  VARIANT (1)..(16): Xaa = Any Amino Acid
CCEWACNPACXTXXGA

SEQ ID NO: 15659 - protein, 17 aa, Artificial Sequence
  Synthetically generated peptide
  VARIANT (1)..(17): Xaa = Any Amino Acid
CCEWACNPACXTXXXGA

SEQ ID NO: 15660 - protein, 17 aa, Artificial Sequence
  Synthetically generated peptide
  VARIANT (1)..(17): Xaa = Any Amino Acid
CCEWACNPACXTXXGXA

SEQ ID NO: 15661 - protein, 16 aa, Artificial Sequence
  Synthetically generated peptide
  VARIANT (1)..(16): Xaa = Any Amino Acid
CCEWACNPACXTXGXA

SEQ ID NO: 15662 - protein, 17 aa, Artificial Sequence
  Synthetically generated peptide
  VARIANT (1)..(17): Xaa = Any Amino Acid
CCEWACNPACXTXGXXA

SEQ ID NO: 15663 - protein, 15 aa, Artificial Sequence
  Synthetically generated peptide
  VARIANT (1)..(15): Xaa = Any Amino Acid
CCEWACNPACXTGXA

SEQ ID NO: 15664 - protein, 16 aa, Artificial Sequence
  Synthetically generated peptide
  VARIANT (1)..(16): Xaa = Any Amino Acid
CCEWACNPACXTGXXA

SEQ ID NO: 15665 - protein, 17 aa, Artificial Sequence
  Synthetically generated peptide
  VARIANT (1)..(17): Xaa = Any Amino Acid
CCEWACNPACXTGXXXA

SEQ ID NO: 15666 - protein, 14 aa, Artificial Sequence
  Synthetically generated peptide
  VARIANT (1)..(14): Xaa = Any Amino Acid
CCEWACNPACTXGA

SEQ ID NO: 15667 - protein, 15 aa, Artificial Sequence
  Synthetically generated peptide
  VARIANT (1)..(15): Xaa = Any Amino Acid
CCEWACNPACTXXGA

SEQ ID NO: 15668 - protein, 16 aa, Artificial Sequence
  Synthetically generated peptide
  VARIANT (1)..(16): Xaa = Any Amino Acid
CCEWACNPACTXXXGA

SEQ ID NO: 15669 - protein, 17 aa, Artificial Sequence
  Synthetically generated peptide
  VARIANT (1)..(17): Xaa = Any Amino Acid
CCEWACNPACTXXXXGA

SEQ ID NO: 15670 - protein, 17 aa, Artificial Sequence
  Synthetically generated peptide
  VARIANT (1)..(17): Xaa = Any Amino Acid
CCEWACNPACTXXXGXA

SEQ ID NO: 15671 - protein, 16 aa, Artificial Sequence
  Synthetically generated peptide
  VARIANT (1)..(16): Xaa = Any Amino Acid
CCEWACNPACTXXGXA

SEQ ID NO: 15672 - protein, 17 aa, Artificial Sequence
  Synthetically generated peptide
  VARIANT (1)..(17): Xaa = Any Amino Acid
CCEWACNPACTXXGXXA

SEQ ID NO: 15673 - protein, 15 aa, Artificial Sequence
  Synthetically generated peptide
  VARIANT (1)..(15): Xaa = Any Amino Acid
CCEWACNPACTXGXA

SEQ ID NO: 15674 - protein, 16 aa, Artificial Sequence
  Synthetically generated peptide
  VARIANT (1)..(16): Xaa = Any Amino Acid
CCEWACNPACTXGXXA

SEQ ID NO: 15675 - protein, 17 aa, Artificial Sequence
  Synthetically generated peptide
  VARIANT (1)..(17): Xaa = Any Amino Acid
CCEWACNPACTXGXXXA

SEQ ID NO: 15676 - protein, 14 aa, Artificial Sequence
  Synthetically generated peptide
  VARIANT (1)..(14): Xaa = Any Amino Acid
CCEWACNPACTGXA

SEQ ID NO: 15677 - protein, 15 aa, Artificial Sequence
  Synthetically generated peptide
  VARIANT (1)..(15): Xaa = Any Amino Acid
CCEWACNPACTGXXA

SEQ ID NO: 15678 - protein, 16 aa, Artificial Sequence
  Synthetically generated peptide
  VARIANT (1)..(16): Xaa = Any Amino Acid
CCEWACNPACTGXXXA

SEQ ID NO: 15679 - protein, 17 aa, Artificial Sequence
  Synthetically generated peptide
  VARIANT (1)..(17): Xaa = Any Amino Acid
CCEWACNPACTGXXXXA

SEQ ID NO: 15680 - protein, 12 aa, Artificial Sequence
  Synthetically generated peptide
CELCINVACTGC

SEQ ID NO: 15681 - protein, 12 aa, Artificial Sequence
  Synthetically generated peptide
CELCVNVACTGC

SEQ ID NO: 15682 - protein, 10 aa, Artificial Sequence
  Synthetically generated peptide
CAELCCNPAC

SEQ ID NO: 15683 - protein, 13 aa, Artificial Sequence
  Synthetically generated peptide
CCGLCCNPACAGC

SEQ ID NO: 15684 - protein, 13 aa, Artificial Sequence
  Synthetically generated peptide
CCGLCCYPACAGC

SEQ ID NO: 15685 - protein, 12 aa, Artificial Sequence
  Synthetically generated peptide
CELCCNPACAGC

SEQ ID NO: 15686 - protein, 13 aa, Artificial Sequence
  Synthetically generated peptide
CCDVCCYPACTGC

SEQ ID NO: 15687 - protein, 13 aa, Artificial Sequence
  Synthetically generated peptide
CCELCCNPACAGC

SEQ ID NO: 15688 - protein, 13 aa, Artificial Sequence
  Synthetically generated peptide
CCELCCYPACAGC

SEQ ID NO: 15689 - protein, 13 aa, Artificial Sequence
  Synthetically generated peptide
CCELCCNPACTGC

SEQ ID NO: 15690 - protein, 13 aa, Artificial Sequence
  Synthetically generated peptide
CCELCCYPACTGC

SEQ ID NO: 15691 - protein, 13 aa, Artificial Sequence
  Synthetically generated peptide
CCELCCNPGCTGC

SEQ ID NO: 15692 - protein, 13 aa, Artificial Sequence
  Synthetically generated peptide
CCEACCNPACTGC

SEQ ID NO: 15693 - protein, 13 aa, Artificial Sequence
  Synthetically generated peptide
CCEKCCNPACTGC

SEQ ID NO: 15694 - protein, 13 aa, Artificial Sequence
  Synthetically generated peptide
CCELCCNPACTAC

SEQ ID NO: 15695 - protein, 13 aa, Artificial Sequence
  Synthetically generated peptide
CCPLCCNPACTGC

SEQ ID NO: 15696 - protein, 13 aa, Artificial Sequence
  Synthetically generated peptide
ACELCANPACTGC

SEQ ID NO: 15697 - protein, 13 aa, Artificial Sequence
  Synthetically generated peptide
CCELACNPACTGA

SEQ ID NO: 15698 - protein, 12 aa, Artificial Sequence
  Synthetically generated peptide
CELCANPACTGC

SEQ ID NO: 15699 - protein, 10 aa, Artificial Sequence
  Synthetically generated peptide
CCELACNPAC

SEQ ID NO: 15700 - protein, 13 aa, Artificial Sequence
  Synthetically generated peptide
CCDVCCNPACAGC

SEQ ID NO: 15701 - protein, 13 aa, Artificial Sequence
  Synthetically generated peptide
CCDVCCNPACTGC

SEQ ID NO: 15702 - protein, 14 aa, Artificial Sequence
  Synthetically generated peptide
CCDVCCNPACAGCY

SEQ ID NO: 15703 - protein, 14 aa, Artificial Sequence
  Synthetically generated peptide
CCDVCCNPACTGCY

SEQ ID NO: 15704 - protein, 13 aa, Artificial Sequence
  Synthetically generated peptide
CCELCCYPACAGC

SEQ ID NO: 15705 - protein, 12 aa, Artificial Sequence
  Synthetically generated peptide
CCICCNPACFGC

SEQ ID NO: 15706 - protein, 11 aa, Artificial Sequence
  Synthetically generated peptide
CCNYCCSPCGC

SEQ ID NO: 15707 - protein, 13 aa, Artificial Sequence
  Synthetically generated peptide
  VARIANT (3)..(4): Xaa = Any Amino Acid
  misc_feature (7)..(7): Xaa can be any naturally occurring amino acid
  misc_feature (11)..(11): Xaa can be any naturally occurring amino acid
CCXXCCXPACXGC

SEQ ID NO: 15708 - protein, 13 aa, Artificial Sequence
  Synthetically generated peptide
  VARIANT (1)..(13): Xaa = Any Amino Acid
CCIXCCNPACFGC

SEQ ID NO: 15709 - protein, 13 aa, Artificial Sequence
  Synthetically generated peptide
  VARIANT (1)..(13): Xaa = Any Amino Acid
CCNYCCSPXCXGC

SEQ ID NO: 15710 - protein, 54 aa, Artificial Sequence; identical to SEQ ID NO: 1717
  Synthetically generated peptide

SEQ ID NO: 15711 - protein, 14 aa, Artificial Sequence
  Synthetically generated peptide
  VARIANT (4)..(14): Xaa = Any Amino Acid
CCEXCCNPACTGCX

SEQ ID NO: 15712 - protein, 6 aa, Artificial Sequence
  Synthetically generated peptide
  VARIANT (4)..(6): Xaa = Arg or Lys
  VARIANT (5)..(5): Xaa = Trp or Ile
RYYXXX

SEQ ID NO: 15713 - protein, 6 aa, Artificial Sequence
  Synthetically generated peptide
KYYRWR

SEQ ID NO: 15714 - protein, 6 aa, Artificial Sequence
  Synthetically generated peptide
RYYRWR

SEQ ID NO: 15715 - protein, 6 aa, Artificial Sequence
  Synthetically generated peptide
KWRYYR

SEQ ID NO: 15716 - protein, 6 aa, Artificial Sequence
  Synthetically generated peptide
RYYRWK

SEQ ID NO: 15717 - protein, 6 aa, Artificial Sequence
  Synthetically generated peptide
RYYRIK

SEQ ID NO: 15718 - protein, 6 aa, Artificial Sequence
  Synthetically generated peptide
RYYRIR

SEQ ID NO: 15719 - protein, 6 aa, Artificial Sequence
  Synthetically generated peptide
RYYKIK

SEQ ID NO: 15720 - protein, 6 aa, Artificial Sequence
  Synthetically generated peptide
RYYKIR

SEQ ID NO: 15721 - protein, 6 aa, Artificial Sequence
  Synthetically generated peptide
RYYKWR

SEQ ID NO: 15722 - protein, 6 aa, Artificial Sequence
  Synthetically generated peptide
RYYKWK

SEQ ID NO: 15723 - protein, 6 aa, Artificial Sequence
  Synthetically generated peptide
RYYRWR

SEQ ID NO: 15724 - protein, 6 aa, Artificial Sequence
  Synthetically generated peptide
RYYRWK

SEQ ID NO: 15725 - protein, 6 aa, Artificial Sequence
  Synthetically generated peptide
RYYRIK

SEQ ID NO: 15726 - protein, 6 aa, Artificial Sequence
  Synthetically generated peptide
RYYKWR

SEQ ID NO: 15727 - protein, 6 aa, Artificial Sequence
  Synthetically generated peptide
RYYKWK

SEQ ID NO: 15728 - protein, 6 aa, Artificial Sequence
  Synthetically generated peptide
RYYRWK

SEQ ID NO: 15729 - protein, 6 aa, Artificial Sequence
  Synthetically generated peptide
KYYRWK

SEQ ID NO: 15730 - protein, 11 aa, Human immunodeficiency virus
YGRKKRRQRRR

SEQ ID NO: 15731 - protein, 11 aa, Human immunodeficiency virus
YARKARRQARR

SEQ ID NO: 15732 - protein, 11 aa, Human immunodeficiency virus
YARAAARQARA

SEQ ID NO: 15733 - protein, 11 aa, Human immunodeficiency virus
YARAARRAARR

SEQ ID NO: 15734 - protein, 11 aa, Human immunodeficiency virus
YARAARRAARA

SEQ ID NO: 15735 - protein, 10 aa, Human immunodeficiency virus
ARRRRRRRRR

SEQ ID NO: 15736 - protein, 11 aa, Human immunodeficiency virus
YAAARRRRRRR

SEQ ID NO: 15737 - protein, 4 aa, Artificial Sequence
  Synthetically generated peptide
FALA

SEQ ID NO: 15738 - protein, 5 aa, Artificial Sequence
  Synthetically generated peptide
VLALA

SEQ ID NO: 15739 - protein, 4 aa, Artificial Sequence
  Synthetically generated peptide
ALAL

SEQ ID NO: 15740 - protein, 5 aa, Artificial Sequence
  Synthetically generated peptide
ALALA

SEQ ID NO: 15741 - protein, 13 aa, Artificial Sequence
  Synthetically generated peptide
CCDVCCNPACAGC

SEQ ID NO: 15742 - protein, 13 aa, Artificial Sequence
  Synthetically generated peptide
CCDACCNPACAGC

SEQ ID NO: 15743 - protein, 13 aa, Artificial Sequence
  Synthetically generated peptide
CCDCCCNPACAGC

SEQ ID NO: 15744 - protein, 13 aa, Artificial Sequence
  Synthetically generated peptide
CCDDCCNPACAGC

SEQ ID NO: 15745 - protein, 13 aa, Artificial Sequence
  Synthetically generated peptide
CCDECCNPACAGC

SEQ ID NO: 15746 - protein, 13 aa, Artificial Sequence
  Synthetically generated peptide
CCDFCCNPACAGC

SEQ ID NO: 15747 - protein, 13 aa, Artificial Sequence
  Synthetically generated peptide
CCDGCCNPACAGC

SEQ ID NO: 15748 - protein, 13 aa, Artificial Sequence
  Synthetically generated peptide
CCDHCCNPACAGC

SEQ ID NO: 15749 - protein, 13 aa, Artificial Sequence
  Synthetically generated peptide
CCDICCNPACAGC

SEQ ID NO: 15750 - protein, 13 aa, Artificial Sequence
  Synthetically generated peptide
CCDKCCNPACAGC

SEQ ID NO: 15751 - protein, 13 aa, Artificial Sequence
  Synthetically generated peptide
CCDLCCNPACAGC

SEQ ID NO: 15752 - protein, 13 aa, Artificial Sequence
  Synthetically generated peptide
CCDMCCNPACAGC

SEQ ID NO: 15753 - protein, 13 aa, Artificial Sequence
  Synthetically generated peptide
CCDNCCNPACAGC

SEQ ID NO: 15754 - protein, 13 aa, Artificial Sequence
  Synthetically generated peptide
CCDPCCNPACAGC

SEQ ID NO: 15755 - protein, 13 aa, Artificial Sequence
  Synthetically generated peptide
CCDQCCNPACAGC

SEQ ID NO: 15756 - protein, 13 aa, Artificial Sequence
  Synthetically generated peptide
CCDRCCNPACAGC

SEQ ID NO: 15757 - protein, 13 aa, Artificial Sequence
  Synthetically generated peptide
CCDSCCNPACAGC

SEQ ID NO: 15758 - protein, 13 aa, Artificial Sequence
  Synthetically generated peptide
CCDTCCNPACAGC

SEQ ID NO: 15759 - protein, 13 aa, Artificial Sequence
  Synthetically generated peptide
CCDWCCNPACAGC

SEQ ID NO: 15760 - protein, 13 aa, Artificial Sequence
  Synthetically generated peptide
CCDYCCNPACAGC

SEQ ID NO: 15761 - protein, 13 aa, Artificial Sequence
  Synthetically generated peptide
CCEICCNPACFGC

SEQ ID NO: 15762 - protein, 13 aa, Artificial Sequence
  Synthetically generated peptide
CCEACCNPACFGC

SEQ ID NO: 15763 - protein, 13 aa, Artificial Sequence
  Synthetically generated peptide
CCECCCNPACFGC

SEQ ID NO: 15764 - protein, 13 aa, Artificial Sequence
  Synthetically generated peptide
CCEDCCNPACFGC

SEQ ID NO: 15765 - protein, 13 aa, Artificial Sequence
  Synthetically generated peptide
CCEECCNPACFGC

SEQ ID NO: 15766 - protein, 13 aa, Artificial Sequence
  Synthetically generated peptide
CCEFCCNPACFGC

SEQ ID NO: 15767 - protein, 13 aa, Artificial Sequence
  Synthetically generated peptide
CCEGCCNPACFGC

SEQ ID NO: 15768 - protein, 13 aa, Artificial Sequence
  Synthetically generated peptide
CCEHCCNPACFGC

SEQ ID NO: 15769 - protein, 13 aa, Artificial Sequence
  Synthetically generated peptide
CCEKCCNPACFGC

SEQ ID NO: 15770 - protein, 13 aa, Artificial Sequence
  Synthetically generated peptide
CCELCCNPACFGC

SEQ ID NO: 15771 - protein, 13 aa, Artificial Sequence
  Synthetically generated peptide
CCEMCCNPACFGC

SEQ ID NO: 15772 - protein, 13 aa, Artificial Sequence
  Synthetically generated peptide
CCENCCNPACFGC

SEQ ID NO: 15773 - protein, 13 aa, Artificial Sequence
  Synthetically generated peptide
CCEPCCNPACFGC

SEQ ID NO: 15774 - protein, 13 aa, Artificial Sequence
  Synthetically generated peptide
CCEQCCNPACFGC

SEQ ID NO: 15775 - protein, 13 aa, Artificial Sequence
  Synthetically generated peptide
CCERCCNPACFGC

SEQ ID NO: 15776 - protein, 13 aa, Artificial Sequence
  Synthetically generated peptide
CCESCCNPACFGC

SEQ ID NO: 15777 - protein, 13 aa, Artificial Sequence
  Synthetically generated peptide
CCETCCNPACFGC

SEQ ID NO: 15778 - protein, 13 aa, Artificial Sequence
  Synthetically generated peptide
CCEVCCNPACFGC

SEQ ID NO: 15779 - protein, 13 aa, Artificial Sequence
  Synthetically generated peptide
CCEWCCNPACFGC

SEQ ID NO: 15780 - protein, 13 aa, Artificial Sequence
  Synthetically generated peptide
CCEYCCNPACFGC

SEQ ID NO: 15781 - protein, 13 aa, Artificial Sequence
  Synthetically generated peptide
CCELCCNPACAPC

SEQ ID NO: 15782 - protein, 13 aa, Artificial Sequence
  Synthetically generated peptide
CCEACCNPACAPC

SEQ ID NO: 15783 - protein, 13 aa, Artificial Sequence
  Synthetically generated peptide
CCECCCNPACAPC

SEQ ID NO: 15784 - protein, 13 aa, Artificial Sequence
  Synthetically generated peptide
CCEDCCNPACAPC

SEQ ID NO: 15785 - protein, 13 aa, Artificial Sequence
  Synthetically generated peptide
CCEECCNPACAPC

SEQ ID NO: 15786 - protein, 13 aa, Artificial Sequence
  Synthetically generated peptide
CCEFCCNPACAPC

SEQ ID NO: 15787 - protein, 13 aa, Artificial Sequence
  Synthetically generated peptide
CCEGCCNPACAPC

SEQ ID NO: 15788 - protein, 13 aa, Artificial Sequence
  Synthetically generated peptide
CCEHCCNPACAPC

SEQ ID NO: 15789 - protein, 13 aa, Artificial Sequence
  Synthetically generated peptide
CCEICCNPACAPC

SEQ ID NO: 15790 - protein, 13 aa, Artificial Sequence
  Synthetically generated peptide
CCEKCCNPACAPC

SEQ ID NO: 15791 - protein, 13 aa, Artificial Sequence
  Synthetically generated peptide
CCEMCCNPACAPC

SEQ ID NO: 15792 - protein, 13 aa, Artificial Sequence
  Synthetically generated peptide
CCENCCNPACAPC

SEQ ID NO: 15793 - protein, 13 aa, Artificial Sequence
  Synthetically generated peptide
CCEPCCNPACAPC

SEQ ID NO: 15794 - protein, 13 aa, Artificial Sequence
  Synthetically generated peptide
CCEQCCNPACAPC

SEQ ID NO: 15795 - protein, 13 aa, Artificial Sequence
  Synthetically generated peptide
CCERCCNPACAPC

SEQ ID NO: 15796 - protein, 13 aa, Artificial Sequence
  Synthetically generated peptide
CCESCCNPACAPC

SEQ ID NO: 15797 - protein, 13 aa, Artificial Sequence
  Synthetically generated peptide
CCETCCNPACAPC

SEQ ID NO: 15798 - protein, 13 aa, Artificial Sequence
  Synthetically generated peptide
CCEVCCNPACAPC

SEQ ID NO: 15799 - protein, 13 aa, Artificial Sequence
  Synthetically generated peptide
CCEWCCNPACAPC

SEQ ID NO: 15800 - protein, 13 aa, Artificial Sequence
  Synthetically generated peptide
CCEYCCNPACAPC

SEQ ID NO: 15801 - protein, 13 aa, Artificial Sequence
  Synthetically generated peptide
CCELCCNPACFGC

SEQ ID NO: 15802 - protein, 13 aa, Artificial Sequence
  Synthetically generated peptide
CCEACCNPACFGC

SEQ ID NO: 15803 - protein, 13 aa, Artificial Sequence
  Synthetically generated peptide
CCECCCNPACFGC

SEQ ID NO: 15804 - protein, 13 aa, Artificial Sequence
  Synthetically generated peptide
CCEDCCNPACFGC

SEQ ID NO: 15805 - protein, 13 aa, Artificial Sequence
  Synthetically generated peptide
CCEECCNPACFGC

SEQ ID NO: 15806 - protein, 13 aa, Artificial Sequence
  Synthetically generated peptide
CCEFCCNPACFGC

SEQ ID NO: 15807 - protein, 13 aa, Artificial Sequence
  Synthetically generated peptide
CCEGCCNPACFGC

SEQ ID NO: 15808 - protein, 13 aa, Artificial Sequence
  Synthetically generated peptide
CCEHCCNPACFGC

SEQ ID NO: 15809 - protein, 13 aa, Artificial Sequence
  Synthetically generated peptide
CCEICCNPACFGC

SEQ ID NO: 15810 - protein, 13 aa, Artificial Sequence
  Synthetically generated peptide
CCEKCCNPACFGC

SEQ ID NO: 15811 - protein, 13 aa, Artificial Sequence
  Synthetically generated peptide
CCEMCCNPACFGC

SEQ ID NO: 15812 - protein, 13 aa, Artificial Sequence
  Synthetically generated peptide
CCENCCNPACFGC

SEQ ID NO: 15813 - protein, 13 aa, Artificial Sequence
  Synthetically generated peptide
CCEPCCNPACFGC

SEQ ID NO: 15814 - protein, 13 aa, Artificial Sequence
  Synthetically generated peptide
CCEQCCNPACFGC

SEQ ID NO: 15815 - protein, 13 aa, Artificial Sequence
  Synthetically generated peptide
CCERCCNPACFGC

SEQ ID NO: 15816 - protein, 13 aa, Artificial Sequence
  Synthetically generated peptide
CCESCCNPACFGC

SEQ ID NO: 15817 - protein, 13 aa, Artificial Sequence
  Synthetically generated peptide
CCETCCNPACFGC

SEQ ID NO: 15818 - protein, 13 aa, Artificial Sequence
  Synthetically generated peptide
CCEVCCNPACFGC

SEQ ID NO: 15819 - protein, 13 aa, Artificial Sequence
  Synthetically generated peptide
CCEWCCNPACFGC

SEQ ID NO: 15820 - protein, 13 aa, Artificial Sequence
  Synthetically generated peptide
CCEYCCNPACFGC

SEQ ID NO: 15821 - protein, 13 aa, Artificial Sequence
  Synthetically generated peptide
CCEVCCNPACAGC

SEQ ID NO: 15822 - protein, 13 aa, Artificial Sequence
  Synthetically generated peptide
CCEACCNPACAGC

SEQ ID NO: 15823 - protein, 13 aa, Artificial Sequence
  Synthetically generated peptide
CCECCCNPACAGC

SEQ ID NO: 15824 - protein, 13 aa, Artificial Sequence
  Synthetically generated peptide
CCEDCCNPACAGC

SEQ ID NO: 15825 - protein, 13 aa, Artificial Sequence
  Synthetically generated peptide
CCEECCNPACAGC

SEQ ID NO: 15826 - protein, 13 aa, Artificial Sequence
  Synthetically generated peptide
CCEFCCNPACAGC

SEQ ID NO: 15827 - protein, 13 aa, Artificial Sequence
  Synthetically generated peptide
CCEGCCNPACAGC

SEQ ID NO: 15828 - protein, 13 aa, Artificial Sequence
  Synthetically generated peptide
CCEHCCNPACAGC

SEQ ID NO: 15829 - protein, 13 aa, Artificial Sequence
  Synthetically generated peptide
CCEICCNPACAGC

SEQ ID NO: 15830 - protein, 13 aa, Artificial Sequence
  Synthetically generated peptide
CCEKCCNPACAGC

SEQ ID NO: 15831 - protein, 13 aa, Artificial Sequence
  Synthetically generated peptide
CCELCCNPACAGC

SEQ ID NO: 15832 - protein, 13 aa, Artificial Sequence
  Synthetically generated peptide
CCEMCCNPACAGC

SEQ ID NO: 15833 - protein, 13 aa, Artificial Sequence
  Synthetically generated peptide
CCENCCNPACAGC

SEQ ID NO: 15834 - protein, 13 aa, Artificial Sequence
  Synthetically generated peptide
CCEPCCNPACAGC

SEQ ID NO: 15835 - protein, 13 aa, Artificial Sequence
  Synthetically generated peptide
CCEQCCNPACAGC

SEQ ID NO: 15836 - protein, 13 aa, Artificial Sequence
  Synthetically generated peptide
CCERCCNPACAGC

SEQ ID NO: 15837 - protein, 13 aa, Artificial Sequence
  Synthetically generated peptide
CCESCCNPACAGC

SEQ ID NO: 15838 - protein, 13 aa, Artificial Sequence
  Synthetically generated peptide
CCETCCNPACAGC

SEQ ID NO: 15839 - protein, 13 aa, Artificial Sequence
  Synthetically generated peptide
CCEWCCNPACAGC

SEQ ID NO: 15840 - protein, 13 aa, Artificial Sequence
  Synthetically generated peptide
CCEYCCNPACAGC

SEQ ID NO: 15841 - protein, 19 aa, Artificial Sequence
  Synthetically generated peptide
MKKLMLAIFISVLSFPSFS

SEQ ID NO: 15842 - protein, 35 aa, Artificial Sequence
  Synthetically generated peptide
QSTESLDSSKEKITLETKKCDVVKNNSEKKSENMN

SEQ ID NO: 15843 - protein, 54 aa, Artificial Sequence
  Synthetically generated peptide
MKKLMLAIFISVLSFPSFSQSTESLDSSKEKITLETKKCDVVKNNSEKKSENMN

SEQ ID NO: 15844 - protein, 18 aa, Artificial Sequence
  Synthetically generated peptide
NTFYCCELCCNPACAGCY

SEQ ID NO: 15845 - protein, 4 aa, Artificial Sequence
  Synthetically generated peptide
NTFY

SEQ ID NO: 15846 - protein, 13 aa, Artificial Sequence
  Synthetically generated peptide
CCELCCNPACAGC

SEQ ID NO: 15847 - protein, 72 aa, Artificial Sequence; identical to SEQ ID NO: 53
  Synthetically generated peptide

SEQ ID NO: 15848 - protein, 53 aa, Artificial Sequence
  Synthetically generated peptide
QSTESLDSSKEKITLETKKCDVVKNNSEKKSENMNNTFYCCELCCNPACAGCY

SEQ ID NO: 15849 - protein, 37 aa, Artificial Sequence
  Synthetically generated peptide
MKKLMLAIFISVLSFPSFSNTFYCCELCCNPACAGCY

SEQ ID NO: 15850 - protein, 13 aa, Artificial Sequence
  Synthetically generated peptide
CCELCCNPACAPC

SEQ ID NO: 15851 - protein, 19 aa, Artificial Sequence
  Synthetically generated peptide
MKKSILFIFLSVLSFSPFP

SEQ ID NO: 15852 - protein, 34 aa, Artificial Sequence
  Synthetically generated peptide
QDAKPVESSKEKITLESKKCNIAKKSNKSGPESM

SEQ ID NO: 15853 - protein, 53 aa, Artificial Sequence
  Synthetically generated peptide
MKKSILFIFLSVLSFSPFPQDAKPVESSKEKITLESKKCNIAKKSNKSGPESM

SEQ ID NO: 15854 - protein, 19 aa, Artificial Sequence
  Synthetically generated peptide
NSSNYCCELCCNPACTGCY

SEQ ID NO: 15855 - protein, 5 aa, Artificial Sequence
  Synthetically generated peptide
NSSNY

SEQ ID NO: 15856 - protein, 13 aa, Artificial Sequence
  Synthetically generated peptide
CCELCCNPACTGC

SEQ ID NO: 15857 - protein, 72 aa, Artificial Sequence
  Synthetically generated peptide
MKKSILFIFLSVLSFSPFPQDAKPVESSKEKITLESKKCNIAKKSNKSGPESMNSSNYCCELCCNPACTGCY

SEQ ID NO: 15858 - protein, 53 aa, Artificial Sequence
  Synthetically generated peptide
QDAKPVESSKEKITLESKKCNIAKKSNKSGPESMNSSNYCCELCCNPACTGCY

SEQ ID NO: 15859 - protein, 38 aa, Artificial Sequence
  Synthetically generated peptide
MKKSILFIFLSVLSFSPFPNSSNYCCELCCNPACTGCY

SEQ ID NO: 15860 - protein, 19 aa, Artificial Sequence
  Synthetically generated peptide
MKKSILFIFLSVLSFSPFA

SEQ ID NO: 15861 - protein, 34 aa, Artificial Sequence
  Synthetically generated peptide
QDAKPAGSSKEKITLESKKCNIVKKNNESSPESM

SEQ ID NO: 15862 - protein, 53 aa, Artificial Sequence; identical to SEQ ID NO: 1742
  Synthetically generated peptide

SEQ ID NO: 15863 - protein, 72 aa, Artificial Sequence
  Synthetically generated peptide
MKKSILFIFLSVLSFSPFAQDAKPAGSSKEKITLESKKCNIVKKNNESSPESMNSSNYCCELCCNPACTGCY

SEQ ID NO: 15864 - protein, 53 aa, Artificial Sequence
  Synthetically generated peptide
QDAKPAGSSKEKITLESKKCNIVKKNNESSPESMNSSNYCCELCCNPACTGCY

SEQ ID NO: 15865 - protein, 19 aa, Artificial Sequence
  Synthetically generated peptide
MKKSILFIFLSVLSFSPFA

SEQ ID NO: 15866 - protein, 34 aa, Artificial Sequence; identical to SEQ ID NO: 15852
  Synthetically generated peptide

SEQ ID NO: 15867 - protein, 53 aa, Artificial Sequence
  Synthetically generated peptide
MKKSILFIFLSVLSFSPFAQDAKPVESSKEKITLESKKCNIAKKSNKSGPESM

SEQ ID NO: 15868 - protein, 19 aa, Artificial Sequence
  Synthetically generated peptide
NSSNYCCELCCNPACTGCY

SEQ ID NO: 15869 - protein, 12 aa, Artificial Sequence
  Synthetically generated peptide
CCELCCNPACTG

SEQ ID NO: 15870 - protein, 42 aa, Artificial Sequence
  Synthetically generated peptide
VLSFSPFAQDAKPVESSKEKITLESKKCNIAKKSNKSDPESM

SEQ ID NO: 15871 - protein, 61 aa, Artificial Sequence
  Synthetically generated peptide
VLSFSPFAQDAKPVESSKEKITLESKKCNIAKKSNKSDPESMNSSNYCCELCCNPACTGCY

SEQ ID NO: 15872 - protein, 19 aa, Artificial Sequence
  Synthetically generated peptide
MKKIVFVLVLMLSSFGAFG

SEQ ID NO: 15873 - protein, 34 aa, Artificial Sequence
  Synthetically generated peptide
QETVSGQFSDALSTPITAEVYKQACDPPLPPAEV

SEQ ID NO: 15874 - protein, 53 aa, Artificial Sequence
  Synthetically generated peptide
MKKIVFVLVLMLSSFGAFGQETVSGQFSDALSTPITAEVYKQACDPPLPPAEV

SEQ ID NO: 15875 - protein, 18 aa, Artificial Sequence
  Synthetically generated peptide
SSDWDCCDVCCNPACAGC

SEQ ID NO: 15876 - protein, 5 aa, Artificial Sequence
  Synthetically generated peptide
SSDWD

SEQ ID NO: 15877 - protein, 13 aa, Artificial Sequence
  Synthetically generated peptide
CCDVCCNPACAGC

SEQ ID NO: 15878 - protein, 71 aa, Artificial Sequence; identical to SEQ ID NO: 55
  Synthetically generated peptide

SEQ ID NO: 15879 - protein, 52 aa, Artificial Sequence
  Synthetically generated peptide
QETVSGQFSDALSTPITAEVYKQACDPPLPPAEVSSDWDCCDVCCNPACAGC

SEQ ID NO: 15880 - protein, 12 aa, Artificial Sequence
  Synthetically generated peptide
QACDPPSPPAEV

SEQ ID NO: 15881 - protein, 30 aa, Artificial Sequence; identical to SEQ ID NO: 27
  Synthetically generated peptide

SEQ ID NO: 15882 - protein, 19 aa, Artificial Sequence
  Synthetically generated peptide
MKKIILALVLMLFSFCTLG

SEQ ID NO: 15883 - protein, 33 aa, Artificial Sequence
  Synthetically generated peptide
QETASMHLDDTLSAPIAAEINRKACDTQTPSPS

SEQ ID NO: 15884 - protein, 52 aa, Artificial Sequence
  Synthetically generated peptide
MKKIILALVLMLFSFCTLGQETASMHLDDTLSAPIAAEINRKACDTQTPSPS

SEQ ID NO: 15885 - protein, 19 aa, Artificial Sequence
  Synthetically generated peptide
EENDDWCCEVCCNPACAGC

SEQ ID NO: 15886 - protein, 6 aa, Artificial Sequence
  Synthetically generated peptide
EENDDW

SEQ ID NO: 15887 - protein, 13 aa, Artificial Sequence
  Synthetically generated peptide
CCEVCCNPACAGC

SEQ ID NO: 15888 - protein, 71 aa, Artificial Sequence
  Synthetically generated peptide
MKKIILALVLMLFSFCTLGQETASMHLDDTLSAPIAAEINRKACDTQTPSPSEENDDWCCEVCCNPACAGC

SEQ ID NO: 15889 - protein, 52 aa, Artificial Sequence
  Synthetically generated peptide
QETASMHLDDTLSAPIAAEINRKACDTQTPSPSEENDDWCCEVCCNPACAGC

SEQ ID NO: 15890 - protein, 38 aa, Artificial Sequence
  Synthetically generated peptide
MKKIILALVLMLFSFCTLGEENDDWCCEVCCNPACAGC

SEQ ID NO: 15891 - protein, 11 aa, Artificial Sequence
  Synthetically generated peptide
KACDTQTPSPS

SEQ ID NO: 15892 - protein, 30 aa, Artificial Sequence; identical to SEQ ID NO: 29
  Synthetically generated peptide

SEQ ID NO: 15893 - protein, 19 aa, Artificial Sequence
  Synthetically generated peptide
MKKIVFVLTLMLFSFGTLG

SEQ ID NO: 15894 - protein, 34 aa, Artificial Sequence
  Synthetically generated peptide
QETASGQVGDVSSSTIATEVSEAECGTQSATTQG

SEQ ID NO: 15895 - protein, 53 aa, Artificial Sequence
  Synthetically generated peptide
MKKIVFVLTLMLFSFGTLGQETASGQVGDVSSSTIATEVSEAECGTQSATTQG

SEQ ID NO: 15896 - protein, 19 aa, Artificial Sequence
  Synthetically generated peptide
ENDWDWCCELCCNPACFGC

SEQ ID NO: 15897 - protein, 6 aa, Artificial Sequence
  Synthetically generated peptide
ENDWDW

SEQ ID NO: 15898 - protein, 13 aa, Artificial Sequence
  Synthetically generated peptide
CCELCCNPACFGC

SEQ ID NO: 15899 - protein, 72 aa, Artificial Sequence
  Synthetically generated peptide
MKKIVFVLTLMLFSFGTLGQETASGQVGDVSSSTIATEVSEAECGTQSATTQGENDWDWCCELCCNPACFGC

SEQ ID NO: 15900 - protein, 53 aa, Artificial Sequence; identical to SEQ ID NO: 30
  Synthetically generated peptide

SEQ ID NO: 15901 - protein, 38 aa, Artificial Sequence
  Synthetically generated peptide
MKKIVFVLTLMLFSFGTLGENDWDWCCELCCNPACFGC

SEQ ID NO: 15902 - protein, 19 aa, Artificial Sequence
  Synthetically generated peptide
MKKIVFVLVLMLSSFGTFG

SEQ ID NO: 15903 - protein, 31 aa, Artificial Sequence
  Synthetically generated peptide
QETASRQFGDAFSTPIAAEVNKKACDTELPP

SEQ ID NO: 15904 - protein, 50 aa, Artificial Sequence
  Synthetically generated peptide
MKKIVFVLVLMLSSFGTFGQETASRQFGDAFSTPIAAEVNKKACDTELPP

SEQ ID NO: 15905 - protein, 16 aa, Artificial Sequence
  Synthetically generated peptide
SDWCCEVCCNPACAGC

SEQ ID NO: 15906 - protein, 13 aa, Artificial Sequence
  Synthetically generated peptide
CCEVCCNPACAGC

SEQ ID NO: 15907 - protein, 66 aa, Artificial Sequence
  Synthetically generated peptide
MKKIVFVLVLMLSSFGTFGQETASRQFGDAFSTPIAAEVNKKACDTELPPSDWCCEVCCNPACAGC

SEQ ID NO: 15908 - protein, 47 aa, Artificial Sequence
  Synthetically generated peptide
QETASRQFGDAFSTPIAAEVNKKACDTELPPSDWCCEVCCNPACAGC

SEQ ID NO: 15909 - protein, 35 aa, Artificial Sequence
  Synthetically generated peptide
MKKIVFVLVLMLSSFGTFGSDWCCEVCCNPACAGC

SEQ ID NO: 15910 - protein, 18 aa, Artificial Sequence
  Synthetically generated peptide
LIDCCEICCNPACFGCLN

SEQ ID NO: 15911 - protein, 13 aa, Artificial Sequence
  Synthetically generated peptide
CCEICCNPACFGC

SEQ ID NO: 15912 - protein, 19 aa, Artificial Sequence
  Synthetically generated peptide
NLIDCCEICCNPACFGCLN

SEQ ID NO: 15913 - protein, 18 aa, Artificial Sequence
  Synthetically generated peptide
MKNLFIALMLLFSSIALS

SEQ ID NO: 15914 - protein, 43 aa, Artificial Sequence
  Synthetically generated peptide
QTVENDTKTVQQPQQIESKVNIKKLSENEECPFIKQVDENGNL

SEQ ID NO: 15915 - protein, 61 aa, Artificial Sequence
  Synthetically generated peptide
MKNLFIALMLLFSSIALSQTVENDTKTVQQPQQIESKVNIKKLSENEECPFIKQVDENGNL

SEQ ID NO: 15916 - protein, 17 aa, Artificial Sequence
  Synthetically generated peptide
IDCCEICCNPACFGCLN

SEQ ID NO: 15917 - protein, 78 aa, Artificial Sequence
  Synthetically generated peptide
MKNLFIALMLLFSSIALSQTVENDTKTVQQPQQIESKVNIKKLSENEECPFIKQVDENGNLIDCCEICCNPACFGCLN

SEQ ID NO: 15918 - protein, 60 aa, Artificial Sequence
  Synthetically generated peptide
QTVENDTKTVQQPQQIESKVNIKKLSENEECPFIKQVDENGNLIDCCEICCNPACFGCLN

SEQ ID NO: 15919 - protein, 18 aa, Artificial Sequence
  Synthetically generated peptide
MRNLFIALMLLFSSIAFS

SEQ ID NO: 15920 - protein, 43 aa, Artificial Sequence
  Synthetically generated peptide
QTVENNKKTVQQPQQIESKVNIKKLSENEECPFIKQVDENGNL

SEQ ID NO: 15921 - protein, 61 aa, Artificial Sequence
  Synthetically generated peptide
MRNLFIALMLLFSSIAFSQTVENNKKTVQQPQQIESKVNIKKLSENEECPFIKQVDENGNL

SEQ ID NO: 15922 - protein, 78 aa, Artificial Sequence
  Synthetically generated peptide
MRNLFIALMLLFSSIAFSQTVENNKKTVQQPQQIESKVNIKKLSENEECPFIKQVDENGNLIDCCEICCNPACFGCLN

SEQ ID NO: 15923 - protein, 60 aa, Artificial Sequence
  Synthetically generated peptide
QTVENNKKTVQQPQQIESKVNIKKLSENEECPFIKQVDENGNLIDCCEICCNPACFGCLN

SEQ ID NO: 15924 - protein, 35 aa, Artificial Sequence
  Synthetically generated peptide
MRNLFIALMLLFSSIAFSIDCCEICCNPACFGCLN

SEQ ID NO: 15925 - protein, 18 aa, Artificial Sequence
  Synthetically generated peptide
MKNLFIALMLLFSSIAFS

SEQ ID NO: 15926 - protein, 43 aa, Artificial Sequence
  Synthetically generated peptide
RTVEDNKKTVQQPQQIESKVNIKKPSENEECPVIKQVDENGNL

SEQ ID NO: 15927 - protein, 61 aa, Artificial Sequence
  Synthetically generated peptide
MKNLFIALMLLFSSIAFSRTVEDNKKTVQQPQQIESKVNIKKPSENEECPVIKQVDENGNL

SEQ ID NO: 15928 - protein, 17 aa, Artificial Sequence
  Synthetically generated peptide
IDRCEICCNPACFGCLN

SEQ ID NO: 15929 - protein, 78 aa, Artificial Sequence
  Synthetically generated peptide
MKNLFIALMLLFSSIAFSRTVEDNKKTVQQPQQIESKVNIKKPSENEECPVIKQVDENGNLIDRCEICCNPACFGCLN

SEQ ID NO: 15930 - protein, 60 aa, Artificial Sequence
  Synthetically generated peptide
RTVEDNKKTVQQPQQIESKVNIKKPSENEECPVIKQVDENGNLIDRCEICCNPACFGCLN

SEQ ID NO: 15931 - protein, 35 aa, Artificial Sequence [sequence omitted]

SEQ ID NO: 15932 - protein, 20 aa, Artificial Sequence
  Synthetically generated peptide
LNDANGLINGDRPIRAQHVC

SEQ ID NO: 15933 - protein, 83 aa, Artificial Sequence
  Synthetically generated peptide
  misc_feature (1)..(11): Xaa can be any naturally occurring amino acid
  misc_feature (14)..(14): Xaa can be any naturally occurring amino acid
  misc_feature (17)..(17): Xaa can be any naturally occurring amino acid
  misc_feature (19)..(20): Xaa can be any naturally occurring amino acid
  misc_feature (22)..(50): Xaa can be any naturally occurring amino acid
  misc_feature (52)..(57): Xaa can be any naturally occurring amino acid
  misc_feature (59)..(62): Xaa can be any naturally occurring amino acid
  misc_feature (64)..(64): Xaa can be any naturally occurring amino acid
  misc_feature (66)..(75): Xaa can be any naturally occurring amino acid
  misc_feature (78)..(83): Xaa can be any naturally occurring amino acid
XXXXXXXXXXXLEXVKXLXXLXXXXXXXXXXXXXXXXXXXXXXXXXXXXXCXXXXXXPXXXXPXCXXXXXXXXXXRLXXXXXX
